(19) United States
(12) Patent Application Publication
(10) Pub. No.: US 2021/0130430 A1
(43) Pub. Date: May 6, 2021

(54) ACTIVATABLE CYTOKINE POLYPEPTIDES AND METHODS OF USE THEREOF

(71) Applicant: Werewolf Therapeutics, Inc., Cambridge, MA (US)

(72) Inventors: William WINSTON, West Newton, MA (US); Heather BRODKIN, West Newton, MA (US); Cynthia SEIDEL-DUGAN, Belmont, MA (US); Daniel HICKLIN, Montclair, NJ (US); Jose Andres SALMERON-GARCIA, Westminster, MA (US)

(21) Appl. No.: 17/028,643

(22) Filed: Sep. 22, 2020

Related U.S. Application Data
(63) Continuation-in-part of application No. PCT/US2019/032320, filed on May 14, 2019.
(60) Provisional application No. 62/671,225, filed on May 14, 2018.
(60) Provisional application No. 62/756,504, filed on Nov. 6, 2018.
(60) Provisional application No. 62/756,507, filed on Nov. 6, 2018.
(60) Provisional application No. 62/756,515, filed on Nov. 6, 2018.
(60) Provisional application No. 62/935,605, filed on Nov. 14, 2019.

(51) Int. Cl. C07K 14/555; C07K 14/715

(52) U.S. Cl. CPC C07K 14/555; C07K 14/5434; C07K 14/7156

(57) ABSTRACT

The disclosure features fusion proteins that are conditionally active variants of a cytokine of interest. In one aspect, the full-length polypeptides of the invention have reduced or minimal cytokine-receptor activating activity even though they contain a functional cytokine polypeptide. Upon activation, e.g., by cleavage of a linker that joins a blocking moiety, e.g. a steric blocking polypeptide, in sequence to the active cytokine, the cytokine can bind its receptor and effect signaling. Typically, the fusion proteins further comprise an in vivo half-life extension element, which may be cleaved from the cytokine in the tumor microenvironment.

### RELATED APPLICATIONS

[0001] This application is a continuation-in-part of PCT/US2019/032320, filed on May 14, 2019, which claims the benefit of U.S. Provisional Application 62/671,225, filed on May 14, 2018, U.S. Provisional Application No. 62/756,504, filed on Nov. 6, 2018, U.S. Provisional Application No. 62/756,507, filed on Nov. 6, 2018, and U.S. Provisional Application No. 62/756,515, filed on Nov. 6, 2018; and claims the benefit of U.S. Provisional Application No. 62/935,605, filed on Nov. 14, 2019, each of which are incorporated herein by reference.

### SEQUENCE LISTING

[0002] The instant application contains a Sequence Listing which has been submitted electronically in ASCII format and is hereby incorporated by reference in its entirety. Said ASCII copy, created on Sep. 22, 2020, is named 761146_000143_SL.txt and is 1,972,103 bytes in size.

### BACKGROUND

[0003] The development of mature immunocompetent lymphoid cells from less-committed precursors, their subsequent antigen-driven immune responses, and the suppression of these and unwanted autoreactive responses are highly dependent and regulated by cytokines (including interleukin-2 [IL-2], IL-4, IL-7, IL-9, IL-15, and IL-21) that utilize receptors in the common y-chain (γc) family (Rochman et al., 2009) and family members including IL-12, 18 and 23. IL-2 is essential for thymic development of Treg cells and critically regulates several key aspects of mature peripheral Treg and antigen-activated conventional T cells. Because of its potent T cell growth factor activity in vitro, IL-2 has been extensively studied in part because this activity offered a potential means to directly boost immunity, e.g., in cancer and AIDS-HIV patients, or a target to antagonize unwanted responses, e.g., transplantation rejection and autoimmune diseases. Although in vitro studies with IL-2 provided a strong rationale for these studies, the function of IL-2 in vivo is clearly much more complex as first illustrated in IL-2-deficient mice, where a rapid lethal autoimmune syndrome, not lack of immunity, was observed (Sadlack et al., 1993, 1995). Similar observations were later made when the gene encoding IL-2Rα (Il2ra) and IL-2Rβ (Il2rb) were individually ablated (Suzuki et al., 1995; Willerford et al., 1995).

[0004] The present invention refers to conditionally active and/or targeted cytokines for use in the treatment of cancer and other diseases dependent on immune up or down regulation. For example, the antitumoral activity of some cytokines is well known and described and some cytokines have already been used therapeutically in humans. Cytokines such as interleukin-2 (IL-2) and interferon α (IFNα) have shown positive antitumoral activity in patients with different types of tumors, such as kidney metastatic carcinoma, hairy cell leukemia, Kaposi sarcoma, melanoma, multiple myeloma, and the like. Other cytokines like IFNβ, the Tumor Necrosis Factor (TNF) α, TNFβ, IL-1, 4, 6, 12, 15 and the CSFs have shown a certain antitumoral activity on some types of tumors and therefore are the object of further studies.

### SUMMARY

[0005] Provided herein are therapeutic proteins, nucleic acids that encode the proteins, and compositions and methods of using the proteins and nucleic acids for the treatment of a disease or disorder, such as proliferative disease, a tumorous disease, an inflammatory disease, an immunological disorder, an autoimmune disease, an infectious disease, a viral disease, an allergic reaction, a parasitic reaction, graft-versus-host disease and the like. In certain embodiments, the protein is one or more of, including any combinations, SEQ ID NOs.: 193-271 and the protein referred to herein as:

ACP200
ACP201
ACP202
ACP203
ACP204
ACP205
ACP206
ACP207
ACP208
ACP211
ACP213
ACP214
ACP215
ACP240
ACP241
ACP242
ACP243
ACP244
ACP245
ACP247
ACP284
ACP285
ACP286
ACP287
ACP288
ACP289
ACP290
ACP291
ACP292
ACP296
ACP297
ACP298
ACP299
ACP300
ACP302
ACP303
ACP304
ACP305
ACP306
ACP309
ACP310
ACP311
ACP312
ACP313
ACP314
ACP336
ACP337
ACP338
ACP339
ACP340
ACP341
ACP342
ACP343
ACP344
ACP345
ACP346
ACP347
ACP348
ACP349
ACP350
ACP351
ACP352
ACP353
ACP354
ACP355
ACP356
ACP357
ACP358
ACP359
ACP371
ACP372
ACP373
ACP374
ACP375
ACP376
ACP377
ACP378
ACP379
ACP383
ACP384
ACP385
ACP386
ACP387
ACP388
ACP389
ACP390
ACP391
ACP392
ACP393
ACP394
ACP395
ACP396
ACP397
ACP398
ACP399
ACP400
ACP401
ACP402
ACP403
ACP404
ACP405
ACP406
ACP407
ACP408
ACP409
ACP410
ACP411
ACP412
ACP413
ACP414
ACP415
ACP416
ACP417
ACP418
ACP419
ACP420
ACP421
ACP422
ACP423
ACP424
ACP425
ACP426
ACP427
ACP428
ACP429
ACP430
ACP431
ACP432
ACP433
ACP434
ACP439
ACP440
ACP441
ACP442
ACP443
ACP444
ACP445
ACP446
ACP447
ACP451
ACP452
ACP453
ACP454
ACP455
ACP456
ACP457
ACP458
ACP459
ACP460
ACP461
ACP462
ACP463
ACP464
ACP465
ACP466
ACP467
ACP468
ACP469
ACP470
ACP471

[0006] The invention features fusion proteins that are conditionally active variants of a cytokine of interest. In one aspect, the full-length polypeptides of the invention have reduced or minimal cytokine-receptor activating activity even though they contain a functional cytokine polypeptide. Upon activation, e.g., by cleavage of a linker that joins a blocking moiety, e.g. a steric blocking polypeptide, in sequence to the active cytokine, the cytokine, e.g., IL-2, IL-7, IL-12, IL-15, IL-18, IL-21, IL-23, IFNalpha, IFNbeta, IFNgamma, TNFalpha, lymphotoxin, TGF-beta1, TGFbeta2, TGFbeta3, GM-CSF, CXCL10, CCL19, CCL20, CCL21 or functional fragment or mutein of any of the foregoing, can bind its receptor and effect signaling. If desired, the full-length polypeptides can include a blocking polypeptide moiety that also provides additional advantageous properties. For example, the full-length polypeptide can contain a blocking polypeptide moiety that also extends the serum half-life and/or targets the full-length polypeptide to a desired site of cytokine activity. Alternatively, the full-length fusion polypeptides can contain a serum half-life extension element and/or targeting domain that are distinct from the blocking polypeptide moiety. Preferably, the fusion protein contains at least one element or domain capable of extending in vivo circulating half-life. Preferably, this element is removed enzymatically in the desired body location (e.g. protease cleavage in the tumor microenvironment), restoring pharmacokinetic properties to the payload molecule (e.g. IL2 or IFNa) substantially similar to the naturally occurring payload molecule. The fusion proteins may be targeted to a desired cell or tissue. As described herein targeting is accomplished through the action of a blocking polypeptide moiety that also binds to a desired target, or through a targeting domain. The domain that recognizes a target antigen on a preferred target (for example a tumor-specific antigen), may be attached to the cytokine via a cleavable or non-cleavable linker. If attached by a non-cleavable linker, the targeting domain may further aid in retaining the cytokine in the tumor, and it may be considered a retention domain. The targeting domain does not necessarily need to be directly linked to the payload molecule, and it may be linked directly to another element of the fusion protein. This is especially true if the targeting domain is attached via a cleavable linker.

[0007] In one aspect is provided a fusion polypeptide comprising a cytokine polypeptide, or functional fragment or mutein thereof, and a blocking moiety, e.g. a steric blocking domain. The blocking moiety is fused to the cytokine polypeptide, directly or through a linker, and can be separated from the cytokine polypeptide by cleavage (e.g, protease mediated cleavage) of the fusion polypeptide at or near the fusion site or linker or in the blocking moiety. For example, when the cytokine polypeptide is fused to a blocking moiety through a linker that contains a protease cleavage site, the cytokine polypeptide is released from the blocking moiety and can bind its receptor, upon protease mediated cleavage of the linker. The linker is designed to be cleaved at the site of desired cytokine activity, for example in the tumor microenvironment, avoiding off-target cytokine activity and reducing overall toxicity of cytokine therapy.

[0008] The blocking moiety can also function as a serum half-life extension element. In some embodiments, the fusion polypeptide further comprises a separate serum half-life extension element. In some embodiments, the fusion polypeptide further comprises a targeting domain. In various embodiments, the serum half-life extension element is a water-soluble polypeptide such as optionally branched or multi-armed polyethylene glycol (PEG), full length human serum albumin (HSA) or a fragment that preserves binding to FcRn, an Fc fragment, or a nanobody that binds to FcRn directly or to human serum albumin.

[0009] In addition to serum half-life extension elements, the pharmaceutical compositions described herein preferably comprise at least one, or more targeting domains that bind to one or more target antigens or one or more regions on a single target antigen. It is contemplated herein that a polypeptide construct of the invention is cleaved, for example, in a disease-specific microenvironment or in the blood of a subject at the protease cleavage site and that the targeting domain(s) will bind to a target antigen on a target cell. At least one target antigen is involved in and/or associated with a disease, disorder or condition. Exemplary target antigens include those associated with a proliferative disease, a tumorous disease, an inflammatory disease, an immunological disorder, an autoimmune disease, an infectious disease, a viral disease, an allergic reaction, a parasitic reaction, a graft-versus-host disease or a host-versus-graft disease.

[0010] In some embodiments, a target antigen is a cell surface molecule such as a protein, lipid or polysaccharide. In some embodiments, a target antigen is a on a tumor cell, virally infected cell, bacterially infected cell, damaged red blood cell, arterial plaque cell, or fibrotic tissue cell.

[0011] Target antigens, in some cases, are expressed on the surface of a diseased cell or tissue, for example a tumor or a cancer cell. Target antigens for tumors include but are not limited to Fibroblast activation protein alpha (FAPa), Trophoblast glycoprotein (5T4), Tumor-associated calcium signal transducer 2 (Trop2), Fibronectin EDB (EDB-FN), fibronectin EIIIB domain, CGS-2, EpCAM, EGFR, HER-2, HER-3, c-Met, FOLR1, FAP, and CEA. Pharmaceutical compositions disclosed herein, also include proteins comprising two antigen binding domains that bind to two different target antigens known to be expressed on a diseased cell or tissue. Exemplary pairs of antigen binding domains include but are not limited to EGFR/CEA, EpCAM/CEA, and HER-2/HER-3.

[0012] In some embodiments, the targeting polypeptides independently comprise a scFv, a VH domain, a VL domain, a non-Ig domain, or a ligand that specifically binds to the target antigen. In some embodiments, the targeting polypeptides specifically bind to a cell surface molecule. In some embodiments, the targeting polypeptides specifically bind to a tumor antigen. In some embodiments, the targeting polypeptides specifically and independently bind to a tumor antigen selected from at least one of EpCAM, EGFR, HER-2, HER-3, cMet, CEA, and FOLR1. In some embodiments, the targeting polypeptides specifically and independently bind to two different antigens, wherein at least one of the antigens is a tumor antigen selected from EpCAM, EGFR, HER-2, HER-3, cMet, CEA, and FOLR1. In some embodiments, the targeting polypeptide serves as a retention domain and is attached to the cytokine via a non-cleavable linker.

[0013] As described herein, the cytokine blocking moiety can bind to the cytokine and thereby block activation of the cognate receptor of the cytokine.

[0014] This disclosure also related to nucleic acids, e.g., DNA, RNA, mRNA, that encode the conditionally active proteins described herein, as well as vectors and host cells that contain such nucleic acids.

[0015] This disclosure also relates to pharmaceutical compositions that contain a conditionally active protein, nucleic acid that encodes the conditionally active protein, and vectors and host cells that contain such nucleic acids. Typically, the pharmaceutical composition contains one or more physiologically acceptable carriers and/or excipients.

[0016] The disclosure also relates to therapeutic methods that include administering to a subject in need thereof an effective amount of a conditionally active protein, nucleic acid that encodes the conditionally active protein, vector or host cells that contain such a nucleic acid, and pharmaceutical compositions of any of the foregoing. Typically, the subject has, or is at risk of developing, a proliferative disease, a tumorous disease, an inflammatory disease, an immunological disorder, an autoimmune disease, an infectious disease, a viral disease, an allergic reaction, a parasitic reaction, a graft-versus-host disease or a host-versus-graft disease.

[0017] The disclosure also relates to the use of a conditionally active protein, nucleic acid that encodes the conditionally active protein, vector or host cells that contain such a nucleic acid, and pharmaceutical compositions of any of the foregoing, for treating a subject in need thereof. Typically the subject has, or is at risk of developing, a proliferative disease, a tumorous disease, an inflammatory disease, an immunological disorder, an autoimmune disease, an infectious disease, a viral disease, an allergic reaction, a parasitic reaction, a graft-versus-host disease or a host-versus-graft disease.

[0018] The disclosure also relates to the use of a conditionally active protein, nucleic acid that encodes the conditionally active protein, vector or host cells that contain such a nucleic acid for the manufacture of a medicament for treating a disease, such as a proliferative disease, a tumorous disease, an inflammatory disease, an immunological disorder, an autoimmune disease, an infectious disease, a viral disease, an allergic reaction, a parasitic reaction, a graft-versus-host disease or a host-versus-graft disease.

### BRIEF DESCRIPTION OF THE DRAWINGS

[0019] FIG. 1A is a schematic illustrating a protease-activated cytokine or chemokine that includes a blocking moiety. The blocking moiety may optionally function as a serum half-life extending domain. To the left of the arrow the drawing shows that a cytokine is connected to a blocking moiety via a protease-cleavable linker, thus blocking its ability to bind to its receptor. To the right of the arrow the drawing shows that in an inflammatory or tumor environment a protease cleaves at a protease-cleavage site on the linker, releasing the blocking moiety and allowing the cytokine to bind to its receptor.

[0020] FIG. 1B is a schematic illustrating a protease-activated cytokine or chemokine wherein HSA (blocking moiety) is directly bound to the cytokine or chemokine of interest, with a protease cleavage site between the HSA and a cytokine or chemokine of interest. To the left of the arrow the drawing shows that a cytokine is connected to a blocking moiety via a protease-cleavable linker, thus blocking its ability to bind to its receptor. To the right of the arrow the drawing shows that in an inflammatory or tumor environment, the protease cleaves at a protease-cleavage site on linker, releasing the blocking moiety and allowing the cytokine to bind to its receptor.

[0021] FIG. 1C is a schematic illustrating a protease-activated cytokine or chemokine wherein more than one HSA (blocking moiety) is bound directly to the molecule of interest. If desired, one or more of the HSA can be bonded to the cytokine or chemokine through a linker, such as a linker that contains a protease cleavage site. To the left of the arrow the drawing shows that a cytokine is connected to a blocking moiety via a protease-cleavable linker, thus blocking its ability to bind to its receptor. To the right of the arrow the drawing shows that in an inflammatory or tumor environment, protease cleaves at protease-cleavage site on linker, releasing the blocking moiety and allowing cytokine to bind receptor. The cytokine now has similar pK properties as compared to the native cytokine (e.g., has a short half-life).

[0022] FIG. 1D is a schematic illustrating a protease-activated cytokine or chemokine comprising more than one cytokine, of the same type or different type, each of which is bonded to a binding domain through a protease-cleavable linker. To the left of the arrow the drawing shows that a cytokine is connected to a blocking moiety via a protease-cleavable linker, thus blocking its ability to bind to its receptor. To the right of the arrow the drawing shows that in an inflammatory or tumor environment a protease cleaves at a protease cleavage site on linker, releasing the blocking moiety and allowing the cytokine to bind to its receptor.

[0023] FIG. 2 is a schematic illustrating a protease-activated cytokine or chemokine comprising a cytokine or chemokine polypeptide, a blocking moiety, and a serum half-life extending domain connected by at least one protease-cleavable linker. To the left of the arrow the drawing shows that a cytokine is connected to a blocking moiety via protease-cleavable linkers, thus blocking its ability to bind to its receptor. It is also bound to a separate half-life extension element, which extends half-life in serum. To the right of the arrow the drawing shows that in an inflammatory or tumor environment a protease cleaves at a protease-cleavage site on linker, thus releasing the serum half-life extension element and the blocking moiety and allowing the cytokine to bind to its receptor. The cytokine now has similar pK properties as compared to the native cytokine (e.g., a short half-life).

[0024] FIG. 3 is a schematic illustrating a protease-activated cytokine or chemokine comprising a cytokine or chemokine polypeptide, a blocking moiety, and a targeting domain connected by at least one protease-cleavable linker. To the left of the arrow the drawing shows that a cytokine is connected to a blocking moiety and a targeting domain via a protease-cleavable linker, thus blocking its ability to bind to its receptor. To the right of the arrow the drawing shows that in an inflammatory or tumor microenvironment a protease cleaves at the protease cleavage site in the linker, releasing the targeting domain and the blocking moiety and allowing the cytokine to bind to its receptor.

[0025] FIG. 4A is a schematic illustrating a protease-activated cytokine or chemokine comprising a cytokine or chemokine polypeptide, a blocking moiety, a targeting domain, and a serum half-life extending domain connected by at least one protease-cleavable linker, wherein the cytokine polypeptide and the targeting domain are connected by a protease-cleavable linker. To the left of the arrow, the drawing shows that a cytokine polypeptide is connected to targeting domain, blocking moiety, and half-life extension element via protease-cleavable linker(s), thus blocking its ability to bind to its receptor. To the right of the arrow the drawing shows that in an inflammatory or tumor environment, the protease cleaves at a protease-cleavage site on linker(s), releasing the half-life extension element, the targeting domain, and the blocking moiety, and allowing the cytokine to bind to its receptor. The cytokine now has similar pK properties as compared to the native cytokine (e.g., short half-life).

[0026] FIG. 4B is a schematic illustrating a protease-activated cytokine or chemokine comprising a cytokine or chemokine polypeptide, a blocking moiety, a targeting domain, and a serum half-life extending domain connected by at least one protease-cleavable linker. To the left of the arrow, the drawing shows that a cytokine is connected to targeting domain, a blocking moiety, and a half-life extension element via protease-cleavable linker(s), thus blocking its ability to bind to its receptor. To the right of the arrow the drawing shows that in an inflammatory or tumor environment, the protease cleaves at a protease-cleavage site on linker(s), releasing the half-life extension element and the blocking moiety and allowing the cytokine to bind to the receptor. The targeting moiety remains bound, keeping the cytokine in the tumor microenvironment. The cytokine now has similar pK properties as compared to the native cytokine (e.g., a short half-life).

[0027] FIG. 5 is a schematic illustrating the structure of a variable domain of an immunoglobulin molecule. The variable domains of both light and heavy immunoglobulin chains contain three hypervariable loops, or complementarity-determining regions (CDRs). The three CDRs of a V domain (CDR1, CDR2, CDR3) cluster at one end of the beta barrel. The CDRs are the loops that connect beta strands B-C, C′-C″, and F-G of the immunoglobulin fold, whereas the bottom loops that connect beta strands AB, CC′, C″-D and E-F of the immunoglobulin fold, and the top loop that connects the D-E strands of the immunoglobulin fold are the non-CDR loops.

[0028] FIG. 6. Place holder

[0029] FIGS. 7A-7H are a series of graphs showing activity of exemplary IL-2 fusion proteins in IL-2 dependent cytotoxic T lymphocyte cell line CTLL-2. Each graph shows results of the IL-2 proliferation assay as quantified by CellTiter-Glo® (Promega) luminescence-based cell viability assay. Each proliferation assay was performed with HSA (FIGS. 7B, 7D, 7F, 7H) or without (FIGS. 7A, 7C, 7E, 7G). Each fusion protein comprises an anti-HSA binder, and both uncleaved and MMP9 protease cleaved versions of the fusion protein were used in each assay.

[0030] FIGS. 8A-8F are a series of graphs showing activity of exemplary IL-2 fusion proteins in IL-2 dependent cytotoxic T lymphocyte cell line CTLL-2. Each graph shows results of the IL-2 proliferation assay as quantified by CellTiter-Glo (Promega) luminescence-based cell viability assay. Both uncleaved and MMP9 protease cleaved versions of the fusion protein were used in each assay.

[0031] FIGS. 9A-9Z are a series of graphs showing activity of exemplary IL-2 fusion proteins in IL-2 dependent cytotoxic T lymphocyte cell line CTLL-2. Each graph shows results of the IL-2 proliferation assay as quantified by CellTiter-Glo (Promega) luminescence-based cell viability assay. Both uncleaved and MMP9 protease cleaved versions of the fusion protein were used in each assay.

[0032] FIG. 10 shows results of protein cleavage assay. Fusion protein ACP16 was run on an SDS-PAGE gel in both cleaved and uncleaved form. As can be seen in the gel, cleavage was complete.

[0033] FIGS. 11A-11B are graphs depicting results from a HEK-Blue IL-12 reporter assay performed on human p40/murine p35 IL12 fusion proteins before and after protease cleavage. Constructs ACP35 (FIG. 11A) and ACP34 (FIG. 11B) were tested. Analysis was performed based on quantification of Secreted Alkaline Phosphatase (SEAP) activity using the reagent QUANTI-Blue® (InvivoGen). Results confirm that IL12 protein fusion proteins are active.

[0034] FIGS. 12A-12F show a series of graphs depicting the results of HEK-blue assay of four IL-12 fusion proteins, before and after cleavage by MMP9. Analysis was performed based on quantification of Secreted Alkaline Phosphatase (SEAP) activity using the reagent QUANTI-Blue (InvivoGen). The data show greater activity in the cleaved IL12 than in the full fusion protein. Constructs tested were ACP06 (FIG. 12A), ACP07 (FIG. 12C), ACP08 (FIG. 12B), ACP09 (FIG. 12D), ACP10 (FIG. 12E), ACP11 (FIG. 12F).

[0035] FIG. 13 shows results of protein cleavage assay. Fusion protein ACP11 was run on an SDS-PAGE gel in both cleaved and uncleaved form. As can be seen in the gel, cleavage was complete.

[0036] FIG. 14 is a schematic which depicts a non-limiting example of an inducible cytokine protein, wherein the construct is activated upon protease cleavage of a linker attached between two subunits of the cytokine.

[0037] FIGS. 15A-15D are graphs depicting results from a HEK-Blue assay performed on human p40/murine p35 IL12 fusion proteins before and after protease cleavage. Results confirm that IL12 protein fusion proteins are active. Each proliferation assay was performed with HSA or without HSA.

[0038] FIGS. 16A-16F are a series of graphs showing activity of exemplary IFNγ fusion proteins compared to activity of mouse IFNγ control using WEHI 279 cell survival assay. Each assay was performed with medium containing HSA (+HSA) or not containing HSA (−HSA). Each fusion protein comprises an anti-HSA binder, and both uncleaved and MMP9 protease cleaved versions of the fusion protein were used in each assay.

[0039] FIGS. 17A-17F are a series of graphs showing activity of exemplary IFNγ fusion proteins compared to activity of mouse IFNγ control using B16 reporter assay. Each assay was performed with medium containing HSA (+HSA) or not containing HSA (−HSA). Each fusion protein comprises an anti-HSA binder, and both uncleaved and MMP9 protease cleaved versions of the fusion protein were used in each assay.

[0040] FIGS. 18A-18B show results of protein cleavage assay, as described in Example 2. Two constructs, ACP31 (IFN-α fusion protein; FIG. 18A) and ACP55 (IFN-γ fusion protein; 18B), were run on an SDS-PAGE gel in both cleaved and uncleaved form. As can be seen in the gel, cleavage was complete.

[0041] FIGS. 19A-19B are a series of graphs (FIGS. 19A and 19B) showing activity of exemplary IFNγ fusion proteins before and after protease cleavage using B16 reporter assay. Each assay was performed with culture medium containing HSA, and each fusion protein comprises an anti-HSA binder. Both uncleaved and MMP9 protease cleaved versions of the fusion protein were used in each assay.

[0042] FIGS. 20A-20B are a series of graphs (FIG. 20A and FIG. 20B) showing activity of exemplary IFNα fusion proteins before and after cleavage using a B16 reporter assay. Each assay was performed with medium containing HSA, and each fusion protein comprises an anti-HSA binder. Both uncleaved and MMP9 protease cleaved versions of the fusion protein were used in each assay.

[0043] FIGS. 21A-21D are a series of graphs depicting the results of tumor growth studies using the MC38 cell line. FIGS. 21A-C show the effect of IFNγ and IFNγ fusion proteins on tumor growth when injected intraperitoneally (IP) using different dosing levels and schedules (ug=micrograms, BID=twice daily, BIW=twice weekly, QW=weekly). FIG. 21D shows the effect of intratumoral (IT) injection of IFNγ and IL-2 on tumor growth.

[0044] FIGS. 22A-22B are a series of graphs showing activity of exemplary IFNγ fusion proteins (ACP51 (FIG. 22A), and ACP52 (FIG. 22B)) cleaved by MMP9 protease compared to activity of uncleaved fusion proteins using B16 reporter assay. Each fusion protein comprises an anti-HSA binder and a tumor targeting domain.

[0045] FIGS. 23A-23B are a series of graphs showing activity of exemplary IFNγ fusion proteins (ACP53 and ACP54) cleaved by MMP9 protease compared to activity of uncleaved fusion proteins using B16 reporter assay. Each fusion protein comprises IFNγ directly fused to albumin.

[0046] FIGS. 24A-24D are graphs depicting results from a HEK-Blue IL-2 reporter assay performed on IL-2 fusion proteins and recombinant human IL2 (Rec hIL-2). Analysis was performed based on quantification of Secreted Alkaline Phosphatase (SEAP) activity using the reagent QUANTI-Blue (InvivoGen). FIG. 24A shows results of IL-2 constructs ACP132 and ACP 133 with and without albumin. FIG. 24B shows results of IL-2 construct ACP16 cleaved and uncleaved. Results of a protein cleavage assay of ACP16 in cleaved and uncleaved forms is also depicted. FIG. 24C shows results of IL-2 construct ACP153 in cleaved and uncleaved forms. Results of a protein cleavage assay are also depicted. FIG. 24D illustrates the results from a HEK-Blue IL-2 assay using wild-type cytokine, intact fusion protein, and protease-cleaved fusion protein.

[0047] FIGS. 25A and 25B are two graphs showing analysis of ACP16 (FIG. 25A) and ACP124 (FIG. 25B) in a HEKBlue IL-2 reporter assay in the presence of HSA. Circles depict the activity of the uncut polypeptide, squares depict activity of the cut polypeptide. FIG. 25C is a graph showing results of a CTLL-2 proliferation assay. CTLL2 cells (ATCC) were plated in suspension at a concentration of 500,000 cells/well in culture media with or without 40 mg/ml human serum albumin (HSA) and stimulated with a dilution series of activatable hIL2 for 72 hours at 37° C. and 5% CO₂. Activity of uncleaved and cleaved activatable ACP16 was tested. Cleaved activatable hIL2 was generated by incubation with active MMP9. Cell activity was assessed using a CellTiter-Glo (Promega) luminescence-based cell viability assay. Circles depict intact fusion protein, and squares depict protease-cleaved fusion protein.

[0048] FIGS. 26A-26C are a series of graphs showing activity of fusion proteins in an HEKBlue IL-12 reporter assay. FIG. 26A depicts IL-12/STAT4 activation in a comparison of ACP11 (a human p40/murine p35 IL12 fusion protein) to ACP04 (negative control). FIG. 26B is a graph showing analysis of ACP91 (a chimeric IL-12 fusion protein). Squares depict activity of the uncut ACP91 polypeptide, and triangles depict the activity of the cut polypeptide (ACP91+MMP9). EC50 values for each are shown in the table. FIG. 26C is a graph showing analysis of ACP136 (a chimeric IL-12 fusion protein). Squares depict activity of the uncut ACP136 polypeptide, and triangles depict the activity of the cut polypeptide (ACP136+MMP9). EC50 values for each are shown in the table insert.

[0049] FIGS. 27A-27F are a series of graphs showing that cleaved mouse IFNα1 polypeptides ACP31 (FIG. 27A), ACP125 (FIG. 27B), ACP126 (FIG. 27C) are active in an B16-Blue IFN-α/β reporter assay.

[0050] FIGS. 28A-28N are a series of graphs depicting the activity of ACP56 (FIG. 28A), ACP57 (FIG. 28B) ACP58 (FIG. 28C), ACP59 (FIG. 28D), ACP60 (FIG. 28E), ACP61+HSA (FIG. 28F), ACP30+HSA (FIG. 28G), ACP73 (FIG. 28H), ACP70+HSA (FIG. 28I), ACP71 (FIG. 28J), ACP72 (FIG. 28K), ACP 73 (FIG. 28L), ACP74 (FIG. 28M), and ACP75 (FIG. 28N) in a B16 IFNγ reporter assay. Each fusion was tested for its activity when cut (squares) and uncut (circles).

[0051] FIGS. 29A-29B are two graphs showing results of analyzing ACP31 (mouse IFNα1 fusion protein) and ACP11 (a human p40/murine p35 IL12 fusion protein) in a tumor xenograft model. FIG. 29A shows tumor volume over time in mice treated with 33 μg ACP31 (circles), 110 μg ACP31 (triangles), 330 μg ACP31 (diamonds), and as controls 1 μg murine wild type IFNα1 (dashed line, squares) and 10 μg mIFNα1 (dashed line, small circles). Vehicle alone is indicated by large open circles. The data show tumor volume decreasing over time in a dose-dependent manner in mice treated with ACP31. FIG. 29B shows tumor volume over time in mice treated with 17.5 μg ACP11 (squares), 175 μg ACP31 (triangles), 525 μg ACP31 (circles), and as controls 2 μg ACP04 (dashed line, triangles) and 10 μg ACP04 (dashed line, diamonds). Vehicle alone is indicated by large open circles. The data show tumor volume decreasing over time in a dose-dependent manner in mice treated with both ACP11 and ACP04 (a human p40/murine p35 IL12 fusion protein).

[0052] FIGS. 30A-30F are a series of spaghetti plots showing tumor volume over time in a mouse xenograft tumor model in mice each treated with vehicle alone (FIG. 30A), 2 μg ACP04 (FIG. 30B), 10 μg ACP04 (FIG. 30C, 17.5 μg ACP11 (FIG. 30D), 175 μg ACP11 (FIG. 30E), and 525 μg ACP11 (FIG. 30F). Each line represents a single mouse.

[0053] FIG. 31A-31C are three graphs showing results of analyzing ACP16 and ACP124 in a tumor xenograft model. FIG. 31A shows tumor volume over time in mice treated with 4.4 μg ACP16 (squares), 17 μg ACP16 (triangles), 70 μg ACP16 (downward triangles), 232 μg ACP16 (dark circles), and as a comparator 12 μg wild type IL-2 (dashed line, triangles) and 36 μg wild type IL-2 (dashed line, diamonds. Vehicle alone is indicated by large open circles. The data show tumor volume decreasing over time in a dose-dependent manner in mice treated with ACP16 at higher concentrations. FIG. 31B shows tumor volume over time in mice treated with 17 μg ACP124 (squares), 70 μg ACP124 (triangles), 230 μg ACP124 (downward triangles), and 700 μg ACP124. Vehicle alone is indicated by large open circles. FIG. 31C shows tumor volume over time in mice treated with 17 μg ACP16 (triangles), 70 μg ACP16 (circles), 232 μg ACP16 (dark circles), and as a comparator 17 μg ACP124 (dashed line, triangles) 70 μg ACP124 (dashed line, diamonds), 230 μg ACP124 (dashed line, diamonds). Vehicle alone is indicated by dark downward triangles. The data show tumor volume decreasing over time in a dose-dependent manner in mice treated with ACP16, but not ACP124.

[0054] FIG. 32A Place holder

[0055] FIGS. 32B-32C are a series of spaghetti plots showing activity of fusion proteins in an MC38 mouse xenograft model corresponding to the data shown in FIG. 31. Each line in the plots is a single mouse.

[0056] FIG. 33 is a graph showing tumor volume over time in a mouse xenograft model showing tumor growth in control mice (open circles) and AP16-treated mice (squares).

[0057] FIGS. 34A-34D are a series of survival plots showing survival of mice over time after treatment with cleavable fusion proteins. FIG. 34A shows data for mice treated with vehicle alone (gray line), 17 μg ACP16 (dark line), and 17μg ACP124 (dashed line). FIG. 34B shows data for mice treated with vehicle alone (gray line), 70 μg ACP16 (dark line), and 70 μg ACP124 (dashed line). FIG. 34C shows data for mice treated with vehicle alone (gray line), 232 μg ACP16 (dark line), and 230 μg ACP124 (dashed line). FIG. 34D shows data for mice treated with vehicle alone (gray line), 232 μg ACP16 (dark line), and 700 μg ACP124 (dashed line).

[0058] FIG. 35 a series of spaghetti plots showing activity of fusion proteins in an MC38 mouse xenograft model. All mouse groups were given four doses total except for the highest three doses of APC132, wherein fatal toxicity was detected after 1 week/2 doses. Shown are vehicle alone (top), 17, 55, 70, and 230 μg ACP16 (top full row), 9, 28, 36, and 119 μg ACP132 (middle full row), and 13, 42, 54, and 177 μg ACP21 (bottom full row). Each line in the plots represents an individual animal.

[0059] FIGS. 36-41 Place holder

[0060] FIGS. 42A-42E shows the results of B16 IFN reporter assays. Inducible interferon constructs of interest were tested before and after cleavage. The relevant wildtype IFN was tested as a control.

[0061] FIG. 43 shows binding data of ACP16, ACP10, ACP11

[0062] FIGS. 44A-44D depict the activity of cytokine fusion proteins constructs ACP243, ACP244, ACP243, ACP244, and ACP247.

[0063] FIG. 45 shows a series of spider plots showing tumor volume over time during treatment with vehicle, IL-12, ACP11 or ACP10.

[0064] FIGS. 46A-46D, 47A-47D, 48A-48B, 49A-49I, 50A-50B and 51A-51C shows data (tumor volume and/or body weight) for mice treated with cytokine fusion proteins constructs.

[0065] FIGS. 52A-52N, 53A, 53B depict the activity of cytokine fusion proteins constructs.

[0066] FIG. 54A-54N shows the results of proliferation assays comparing cut protein, uncut protein, and IL2 as a control.

[0067] FIGS. 55A-55N shows the results of HekBlue IL2 reporter assays comparing activity of constructs with and without protease cleavage; IL-2 is included as a control.

[0068] FIGS. 56. 57A-57D, 58, 59A-59C, 59E-59Z and 59AA depict the activity of cytokine fusion proteins constructs.

### DETAILED DESCRIPTION

[0069] Disclosed herein are methods and compositions to engineer and use constructs comprising inducible cytokines. Cytokines are potent immune agonists, which lead to them being considered promising therapeutic agents for oncology. However, cytokines proved to have a very narrow therapeutic window. Cytokines have short serum half-lives and are also considered to be highly potent. Consequently, therapeutic administration of cytokines produced undesirable systemic effects and toxicities. These were exacerbated by the need to administer large quantities of cytokine in order to achieve the desired levels of cytokine at the intended site of cytokine action (e.g., a tumor). Unfortunately, due to the biology of cytokines and inability to effectively target and control their activity, cytokines did not achieve the hoped-for clinical advantages in the treatment of tumors.

[0070] Disclosed herein are fusion proteins that overcome the toxicity and short half-life problems that have severely limited the clinical use of cytokines in oncology. The fusion proteins contain cytokine polypeptides that have receptor agonist activity. But in the context of the fusion protein, the cytokine receptor agonist activity is attenuated and the circulating half-life is extended. The fusion proteins include protease cleave sites, which are cleaved by proteases that are associated with a desired site of cytokine activity (e.g., a tumor), and are typically enriched or selectively present at the site of desired activity. Thus, the fusion proteins are preferentially (or selectively) and efficiently cleaved at the desired site of activity to limit cytokine activity substantially to the desired site of activity, such as the tumor microenvironment. Protease cleavage at the desired site of activity, such as in a tumor microenvironment, releases a form of the cytokine from the fusion protein that is much more active as a cytokine receptor agonist than the fusion protein (typically at least about 100× more active than the fusion protein). The form of the cytokine that is released upon cleavage of the fusion protein typically has a short half-life, which is often substantially similar to the half-life of the naturally occurring cytokine, further restricting cytokine activity to the tumor microenvironment. Even though the half-life of the fusion protein is extended, toxicity is dramatically reduced or eliminated because the circulating fusion protein is attenuated and active cytokine is targeted to the tumor microenvironment. The fusion proteins described herein, for the first time, enable the administration of an effective therapeutic dose of a cytokine to treat tumors with the activity of the cytokine substantially limited to the tumor microenvironment, and dramatically reduces or eliminates unwanted systemic effects and toxicity of the cytokine.

[0071] Unless otherwise defined, all terms of art, notations and other scientific terminology used herein are intended to have the meanings commonly understood by those of skill in the art to which this invention pertains. In some cases, terms with commonly understood meanings are defined herein for clarity and/or for ready reference, and the inclusion of such definitions herein should not necessarily be construed to represent a difference over what is generally understood in the art. The techniques and procedures described or referenced herein are generally well understood and commonly employed using conventional methodologies by those skilled in the art, such as, for example, the widely utilized molecular cloning methodologies described in Sambrook et al., Molecular Cloning: A Laboratory Manual 4th ed. (2012) Cold Spring Harbor Laboratory Press, Cold Spring Harbor, N.Y. As appropriate, procedures involving the use of commercially available kits and reagents are generally carried out in accordance with manufacturer-defined protocols and conditions unless otherwise noted.

[0072] “Cytokine” is a well-known term of art that refers to any of a class of immunoregulatory proteins (such as interleukin or interferon) that are secreted by cells especially of the immune system and that are modulators of the immune system. Cytokine polypeptides that can be used in the fusion proteins disclosed herein include, but are not limited to transforming growth factors, such as TGF-α and TGF-β (e.g., TGFbeta1, TGFbeta2, TGFbeta3); interferons, such as interferon-α, interferon-β, interferon-γ, interferon-kappa and interferon-omega; interleukins, such as IL-1, IL-1α, IL-2, IL-3, IL-4, IL-5, IL-6, IL-7, IL-8, IL-9, IL-10, IL-11, IL-12, IL-13, IL-14, IL-15, IL-16, IL-17, IL-18, IL-21 and IL-25; tumor necrosis factors, such as tumor necrosis factor alpha and lymphotoxin; chemokines (e.g., C—X—C motif chemokine 10 (CXCL10), CCL19, CCL20, CCL21), and granulocyte macrophage-colony stimulating factor (GM-CS), as well as fragments of such polypeptides that active the cognate receptors for the cytokine (i.e., functional fragments of the foregoing). “Chemokine” is a term of art that refers to any of a family of small cytokines with the ability to induce directed chemotaxis in nearby responsive cells.

[0073] Cytokines are well-known to have short serum half-lives that frequently are only a few minutes or hours. Even forms of cytokines that have altered amino acid sequences intended to extend the serum half-life yet retain receptor agonist activity typically also have short serum half-lives. As used herein, a “short-half-life cytokine” refers to a cytokine that has a substantially brief half-life circulating in the serum of a subject, such as a serum half-life that is less than 10, less than 15, less than 30, less than 60, less than 90, less than 120, less than 240, or less than 480 minutes. As used herein, a short half-life cytokine includes cytokines which have not been modified in their sequence to achieve a longer than usual half-life in the body of a subject and polypeptides that have altered amino acid sequences intended to extend the serum half-life yet retain receptor agonist activity. This latter case is not meant to include the addition of heterologous protein domains, such as a bona fide half-life extension element, such as serum albumin.

[0074] “Sortases” are transpeptidases that modify proteins by recognizing and cleaving a carboxyl-terminal sorting signal embedded in or terminally attached to a target protein or peptide. Sortase A catalyzes the cleavage of the LPXTG motif (SEQ ID NO.: 442) (where X is any standard amino acid) between the Thr and Gly residue on the target protein, with transient attachment of the Thr residue to the active site Cys residue on the enzyme, forming an enzyme-thioacyl intermediate. To complete transpeptidation and create the peptide-monomer conjugate, a biomolecule with an N-terminal nucleophilic group, typically an oligoglycine motif, attacks the intermediate, displacing Sortase A and joining the two molecules.

[0075] As used herein, the term “steric blocker” refers to a polypeptide or polypeptide moiety that can be covalently bonded to a cytokine polypeptide directly or indirectly through other moieties such as linkers, for example in the form of a chimeric polypeptide (fusion protein), but otherwise does not covalently bond to the cytokine polypeptide. A steric blocker can non-covalently bond to the cytokine polypeptide, for example though electrostatic, hydrophobic, ionic or hydrogen bonding. A steric blocker typically inhibits or blocks the activity of the cytokine moiety due to its proximity to the cytokine moiety and comparative size. A steric blocker may also block by virtue of recruitment of a large protein binding partner. An example of this is an antibody which binds to serum albumin; while the antibody itself may or may not be large enough to block activation or binding on its own, recruitment of albumin allows for sufficient steric blocking.

[0076] As used and described herein, a “half-life extension element” is a part of the chimeric polypeptide that increases the serum half-life and improve pK, for example, by altering its size (e.g., to be above the kidney filtration cutoff), shape, hydrodynamic radius, charge, or parameters of absorption, biodistribution, metabolism, and elimination.

[0077] As used herein, the terms “activatable,” “activate,” “induce,” and “inducible” refer to the ability of a protein, i.e. a cytokine, that is part of a fusion protein, to bind its receptor and effectuate activity upon cleavage of additional elements from the fusion protein.

[0078] As used herein, “plasmids” or “viral vectors” are agents that transport the disclosed nucleic acids into the cell without degradation and include a promoter yielding expression of the nucleic acid molecule and/or polypeptide in the cells into which it is delivered.

[0079] As used herein, the terms “peptide”, “polypeptide”, or “protein” are used broadly to mean two or more amino acids linked by a peptide bond. Protein, peptide, and polypeptide are also used herein interchangeably to refer to amino acid sequences. It should be recognized that the term polypeptide is not used herein to suggest a particular size or number of amino acids comprising the molecule and that a peptide of the invention can contain up to several amino acid residues or more.

[0080] As used throughout, “subject” can be a vertebrate, more specifically a mammal (e.g. a human, horse, cat, dog, cow, pig, sheep, goat, mouse, rabbit, rat, and guinea pig), birds, reptiles, amphibians, fish, and any other animal. The term does not denote a particular age or sex. Thus, adult and newborn subjects, whether male or female, are intended to be covered.

[0081] As used herein, “patient” or “subject” may be used interchangeably and can refer to a subject with a disease or disorder (e.g. cancer). The term patient or subject includes human and veterinary subjects.

[0082] As used herein the terms “treatment”, “treat”, or “treating” refers to a method of reducing the effects of a disease or condition or symptom of the disease or condition. Thus, in the disclosed method, treatment can refer to at least about 10%, at least about 20%, at least about 30%, at least about 40%, at least about 50%, at least about 60%, at least about 70%, at least about 80%, at least about 90%, or substantially complete reduction in the severity of an established disease or condition or symptom of the disease or condition. For example, a method for treating a disease is considered to be a treatment if there is a 10% reduction in one or more symptoms of the disease in a subject as compared to a control. Thus, the reduction can be a 10%, 20%, 30%, 40%, 50%, 60%, 70%, 80%, 90%, 100%, or any percent reduction in between 10% and 100% as compared to native or control levels. It is understood that treatment does not necessarily refer to a cure or complete ablation of the disease, condition, or symptoms of the disease or condition.

[0083] As used herein, the terms “prevent”, “preventing”, and “prevention” of a disease or disorder refers to an action, for example, administration of the chimeric polypeptide or nucleic acid sequence encoding the chimeric polypeptide, that occurs before or at about the same time a subject begins to show one or more symptoms of the disease or disorder, which inhibits or delays onset or exacerbation of one or more symptoms of the disease or disorder.

[0084] As used herein, references to “decreasing”, “reducing”, or “inhibiting” include a change of at least about 10%, of at least about 20%, of at least about 30%, of at least about 40%, of at least about 50%, of at least about 60%, of at least about 70%, of at least about 80%, of at least about 90% or greater as compared to a suitable control level. Such terms can include but do not necessarily include complete elimination of a function or property, such as agonist activity.

[0085] An “attenuated cytokine receptor agonist” is a cytokine receptor agonist that has decreased receptor agonist activity as compared to the cytokine receptor's naturally occurring agonist. An attenuated cytokine agonist may have at least about 10×, at least about 50×, at least about 100×, at least about 250×, at least about 500×, at least about 1000× or less agonist activity as compared to the receptor's naturally occurring agonist. When a fusion protein that contains a cytokine polypeptide as described herein is described as “attenuated” or having “attenuated activity”, it is meant that the fusion protein is an attenuated cytokine receptor agonist.

[0086] An “intact fusion protein” is a fusion protein in which no domain has been removed, for example by protease cleavage. A domain may be removable by protease cleavage or other enzymatic activity, but when the fusion protein is “intact”, this has not occurred.

[0087] As used herein “moiety” refers to a portion of a molecule that has a distinct function within that molecule, and that function may be performed by that moiety in the context of another molecule. A moiety may be a chemical entity with a particular function, or a portion of a biological molecule with a particular function. For example, a “blocking moiety” within a fusion protein is a portion of the fusion protein which is capable of blocking the activity of some or all of the fusion polypeptide. This may be a protein domain, such as serum albumin. Blocking may be accomplished by a steric blocker or a specific blocker. A steric blocker blocks by virtue of size and position and not based upon specific binding; an examples is serum albumin. A specific blocker blocks by virtue of specific interactions with the moiety to be blocked. A specific blocker must be tailored to the particular cytokine or active domain; a steric blocker can be used regardless of the payload, as long as it is large enough.

[0088] In general, the therapeutic use of cytokines is strongly limited by their systemic toxicity. TNF, for example, was originally discovered for its capacity of inducing the hemorrhagic necrosis of some tumors, and for its in vitro cytotoxic effect on different tumoral lines, but it subsequently proved to have strong pro-inflammatory activity, which can, in case of overproduction conditions, dangerously affect the human body. As the systemic toxicity is a fundamental problem with the use of pharmacologically active amounts of cytokines in humans, novel derivatives and therapeutic strategies are now under evaluation, aimed at reducing the toxic effects of this class of biological effectors while keeping their therapeutic efficacy.

[0089] IL-2 exerts both stimulatory and regulatory functions in the immune system and is, along with other members of the common γ chain (γc) cytokine family, central to immune homeostasis. IL-2 mediates its action by binding to IL-2 receptors (IL-2R), consisting of either trimeric receptors made of IL-2Rα (CD25), IL-2Rβ (CD122), and IL-2Rγ (γc, CD132) chains or dimeric βγ IL-2Rs (1, 3). Both IL-2R variants are able to transmit signal upon IL-2 binding. However, trimeric αβγ IL-2Rs have a roughly 10-100 times higher affinity for IL-2 than dimeric βγ IL-2Rs (3), implicating that CD25 confers high-affinity binding of IL-2 to its receptor but is not crucial for signal transduction. Trimeric IL-2Rs are found on activated T cells and CD4+ forkhead box P3 (FoxP3)+ T regulatory cells (Treg), which are sensitive to IL-2 in vitro and in vivo. Conversely, antigen-experienced (memory) CD8+, CD44 high memory-phenotype (MP) CD8+, and natural killer (NK) cells are endowed with high levels of dimeric βγ IL-2Rs, and these cells also respond vigorously to IL-2 in vitro and in vivo.

[0090] Expression of the high-affinity IL-2R is critical for endowing T cells to respond to low concentrations of IL-2 that is transiently available in vivo. IL-2Rα expression is absent on naive and memory T cells but is induced after antigen activation. IL-2Rβ is constitutively expressed by NK, NKT, and memory CD8+ T cells but is also induced on naive T cells after antigen activation. γc is much less stringently regulated and is constitutively expressed by all lymphoid cells. Once the high-affinity IL-2R is induced by antigen, IL-2R signaling upregulates the expression of IL-2Rα in part through Stat5-dependent regulation of Il2ra transcription (Kim et al., 2001). This process represents a mechanism to maintain expression of the high-affinity IL-2R and sustain IL-2 signaling while there remains a source of IL-2.

[0091] IL-2 is captured by IL-2Rα through a large hydrophobic binding surface surrounded by a polar periphery that results in a relatively weak interaction (Kd 10-8 M) with rapid on-off binding kinetics. However, the IL-2Rα-IL-2 binary complex leads to a very small conformational change in IL-2 that promotes association with IL-2Rβ through a distinct polar interaction between IL-2 and IL-2Rβ. The pseudo-high affinity of the IL2/α/β trimeric complex (i.e. Kd˜300 pM) clearly indicates that the trimeric complex is more stable than either IL2 bound to the a chain alone (Kd=10 nM) or to the β chain alone (Kd=450 nM) as shown by Ciardelli's data. In any event, the IL2/α/β trimer then recruits the γ chain into the quaternary complex capable of signaling, which is facilitated by the large composite binding site on the IL2-bound β chain for the γ chain.

[0092] In other words, the ternary IL-2Rα-IL-2Rβ-IL-2 complex then recruits γc through a weak interaction with IL-2 and a stronger interaction with IL-2Rβ to produce a stable quaternary high-affinity IL-2R (Kd 10-11 M which is 10 pM). The formation of the high-affinity quaternary IL-2-IL-2R complex leads to signal transduction through the tyrosine kinases Jak1 and Jak3, which are associated with IL-2Rβ and γc, respectively (Nelson and Willerford, 1998). The quaternary IL-2-IL-2R complex is rapidly internalized, where IL-2, IL-2Rβ, and γc are rapidly degraded, but IL-2Rα is recycled to the cell surface (Hamar et al., 1995; Yu and Malek, 2001). Thus, those functional activities that require sustained IL-2R signaling require a continued source of IL-2 to engage IL-2Rα and form additional IL-2-IL-2R signaling complexes.

[0093] Interleukin-15 (IL-15), another member of the 4-alpha-helix bundle family of cytokines, has also emerged as an immunomodulator for the treatment of cancer. IL-15 is initially captured via IL-15Rα, which is expressed on antigen-presenting dendritic cells, monocytes and macrophages. IL-15 exhibits broad activity and induces the differentiation and proliferation of T, B and natural killer (NK) cells via signaling through the IL-15/IL-2-R-β (CD122) and the common γ chain (CD132). It also enhances cytolytic activity of CD8⁺ T cells and induces long-lasting antigen-experienced CD8⁺CD44 memory T cells. IL-15 stimulates differentiation and immunoglobulin synthesis by B cells and induces maturation of dendritic cells. It does not stimulate immunosuppressive T regulatory cells (Tregs). Thus, boosting IL-15 activity selectively in the tumor micro-environment could enhance innate and specific immunity and fight tumors (Waldmann et al., 2012). IL-15 was initially identified for its ability to stimulate T cell proliferation in an IL-2-like manner through common receptor components (IL-2R/15Rβ-γc) and signaling through JAK1/JAK3 and STAT3/STATS. Like IL-2, IL-15 has been shown to stimulate proliferation of activated CD4-CD8−, CD4+CD8+, CD4+ and CD8+ T cells as well as facilitate the induction of cytotoxic T-lymphocytes, and the generation, proliferation and activation of NK cells (Waldmann et al., 1999). However, unlike IL-2 which is required to maintain forkhead box P3 (FOXP3)-expressing CD4+CD25+ Treg cells and for the retention of these cells in the periphery, IL-15 has little effect on Tregs (Berger et al., 2009). This is important as FOXP3-expressing CD4+CD25+ Tregs inhibit effector T cells, thereby inhibiting immune responses including those directed against the tumor. IL-2 also has a crucial role in initiating activation induced cell death (AICD), a process that leads to the elimination of self-reactive T cells, whereas IL-15 is an anti-apoptotic factor for T cells (Marks-Konczalik et al., 2000). IL-15 co-delivered with HIV peptide vaccines has been shown to overcome CD4+ T cell deficiency by promoting longevity of antigen-specific CD8+ T cells and blocking TRAIL-mediated apoptosis (Oh et al., 2008). Furthermore, IL-15 promotes the long-term maintenance of CD8+CD44hi memory T cells (Kanegane et al., 1996).

[0094] The importance of IL-15 and IL-15Rα to T and NK cell development is further highlighted by the phenotype of IL-15Rα^{-/-} and IL-15^{-/-} mice. Knockout mice demonstrate decreased numbers of total CD8+ cells, and are deficient in memory-phenotype CD8+ T cells, NK cells, NK/T cells and some subsets of intestinal intraepithelial lymphocytes, indicating that IL-15 provides essential positive homeostatic functions for these subsets of cells (Lodolce et al., 1996; Kennedy et al., 1998). The similarities in the phenotypes of these two strains of knockout mice suggest the importance of IL-15Rα in maintaining physiologically relevant IL-15 signals.

[0095] IL-15 is presented in trans by the IL-15 receptor alpha-chain to the IL-15Rβγc complex displayed on the surface of T cells and natural killer (NK) cells (Han et al., 2011). The IL-15Ra-chain plays a role of chaperone protein, stabilizes, and increases IL-15 activity (Desbois et al., 2016). It has been shown that exogenous IL-15 may have a limited impact on patients with cancer due to its dependency on IL-15Ra frequently downregulated in cancer patients. Therefore, the fusion protein RLI, composed of the sushi+ domain of IL15Ra coupled via a linker to IL-15, has been suggested as an alternative approach to IL15 therapy (Bessard et al., 2009). It was found that administration of soluble IL-15/IL-15Rα complexes greatly enhanced IL-15 serum half-life and bioavailability in vivo (Stoklasek et al., 2010).

[0096] In addition to the effects on T and NK cells, IL-15 also has several effects on other components of the immune system. IL-15 protects neutrophils from apoptosis, modulates phagocytosis and stimulates the secretion of IL-8 and IL-1R antagonist. It functions through the activation of JAK2, p38 and ERK1/2 MAPK, Syk kinase and the NF-kB transcriptional factor (Pelletier et al., 2002). In mast cells, IL-15 can act as a growth factor and an inhibitor of apoptosis. In these cells IL-15 activates the JAK2/STATS pathway without the requirement of γc binding (Tagaya et al., 1996). IL-15 also induces B lymphocyte proliferation and differentiation, and increases immunoglobulin secretion (Armitage et al., 1995). It also prevents Fas-mediated apoptosis and allows induction of antibody responses partially independent of CD4-help (Demerci et al., 2004; Steel et al., 2010). Monocytes, macrophages and dendritic cells effectively transcribe and translate IL-15. They also respond to IL-15 stimulation. Macrophages respond by increasing phagocytosis, inducing IL-8, IL-12 and MCP-1 expression, and secreting IL-6, IL-8 and TNF α (Budagian et al., 2006). Dendritic cells incubated with IL-15 demonstrate maturation with increased CD83, CD86, CD40, and MHC class II expression, are also resistant to apoptosis, and show enhanced interferon-γ secretion (Anguille et al., 2009). [97] IL-15 has also been shown to have effects on non-hematological cells including myocytes, adipocytes, endothelial and neural cells. IL-15 has an anabolic effect on muscle and may support muscle cell differentiation (Quinn et al., 1995). It stimulates myocytes and muscle fibers to accumulate contractile protein and is able to slow muscle wasting in rats with cancer-related cachexia (Figueras et al., 2004). IL-15 has also been shown to stimulate angiogenesis (Angiolillo et al., 1997) and induce microglial growth and survival (Hanisch et al., 1997).

[0097] Interleukin-7 (IL-7), also of the IL-2/IL-15 family, is a well-characterized pleiotropic cytokine, and is expressed by stromal cells, epithelial cells, endothelial cells, fibroblasts, smooth muscle cells and keratinocytes, and following activation, by dendritic cells (Alpdogan et al., 2005). Although it was originally described as a growth and differentiation factor for precursor B lymphocytes, subsequent studies have shown that IL-7 is critically involved in T-lymphocyte development and differentiation. Interleukin-7 signaling is essential for optimal CD8 T-cell function, homeostasis and establishment of memory (Schluns et al., 2000); it is required for the survival of most T-cell subsets, and its expression has been proposed to be important for regulating T-cell numbers.

[0098] IL-7 binds to a dimeric receptor, including IL-7Rα and γ_{c} to form a ternary complex that plays fundamental roles in extracellular matrix remodeling, development, and homeostasis of T and B cells (Mazzucchelli and Durum, 2007). IL-7Rα also cross-reacts to form a ternary complex with thymic stromal lymphopoietin (TSLP) and its receptor (TSLPR), and activates the TSLP pathway, resulting in T and dendritic cell proliferation in humans and further B cell development in mice (Leonard, 2002). Tight regulation of the signaling cascades activated by the complexes are therefore crucial to normal cellular function. Under-stimulation of the IL-7 pathway caused by mutations in the IL-7Rα ectodomain inhibits T and B cell development, resulting in patients with a form of severe combined immunodeficiency (SCID) (Giliani et al., 2005; Puel et al., 1998).

[0099] IL-7 has a potential role in enhancing immune reconstitution in cancer patients following cytotoxic chemotherapy. IL-7 therapy enhances immune reconstitution and can augment even limited thymic function by facilitating peripheral expansion of even small numbers of recent thymic emigrants. Therefore, IL-7 therapy could potentially repair the immune system of patients who have been depleted by cytotoxic chemotherapy (Capitini et al., 2010).

[0100] Interleukin-12 (IL-12) is a disulfide-linked heterodimer of two separately encoded subunits (p35 and p40), which are linked covalently to give rise to the so-called bioactive heterodimeric (p70) molecule (Lieschke et al., 1997; Jana et al., 2014). Apart from forming heterodimers (IL-12 and IL-23), the p40 subunit is also secreted as a monomer (p40) and a homodimer (p40₂). It is known in the art that synthesis of the heterodimer as a single chain with a linker connecting the p35 to the p40 subunit preserves the full biological activity of the heterodimer. IL-12 plays a critical role in the early inflammatory response to infection and in the generation of Th1 cells, which favor cell-mediated immunity. It has been found that overproduction of IL-12 can be dangerous to the host because it is involved in the pathogenesis of a number of autoimmune inflammatory diseases (e.g. MS, arthritis, type 1 diabetes).

[0101] The IL-12 receptor (IL-12R) is a heterodimeric complex consisting of IL-12Rβ1 and IL-12Rβ2 chains expressed on the surface of activated T-cells and natural killer cells (Trinchieri et al.,2003). The IL-12Rβ1 chain binds to the IL-12p40 subunit, whereas IL-12p35 in association with IL-12Rβ2 confers an intracellular signaling ability (Benson et al., 2011). Signal transduction through IL-12R induces phosphorylation of Janus kinase (Jak2) and tyrosine kinase (Tyk2), that phosphorylate and activate signal transducer and activator of transcription (STAT)1, STAT3, STAT4, and STATS. The specific cellular effects of IL-12 are due mainly to activation of STAT4. IL-12 induces natural killer and T-cells to produce cytokines, in particular interferon (IFN)γ, that mediate many of the proinflammatory activities of IL-12, including CD4+ T-cell differentiation toward the Th1 phenotype (Montepaone et al., 2014).

[0102] Regulatory T cells actively suppress activation of the immune system and prevent pathological self-reactivity and consequent autoimmune disease. Developing drugs and methods to selectively activate regulatory T cells for the treatment of autoimmune disease is the subject of intense research and, until the development of the present invention, which can selectively deliver active interleukins at the site of inflammation, has been largely unsuccessful. Regulatory T cells (Treg) are a class of CD4+CD25+ T cells that suppress the activity of other immune cells. Treg are central to immune system homeostasis, and play a major role in maintaining tolerance to self-antigens and in modulating the immune response to foreign antigens. Multiple autoimmune and inflammatory diseases, including Type 1 Diabetes (T1D), Systemic Lupus Erythematosus (SLE), and Graft-versus-Host Disease (GVHD) have been shown to have a deficiency of Treg cell numbers or Treg function.

[0103] Consequently, there is great interest in the development of therapies that boost the numbers and/or function of Treg cells. One treatment approach for autoimmune diseases being investigated is the transplantation of autologous, ex vivo-expanded Treg cells (Tang, Q., et al, 2013, Cold Spring Harb. Perspect. Med., 3:1-15). While this approach has shown promise in treating animal models of disease and in several early stage human clinical trials, it requires personalized treatment with the patient's own T cells, is invasive, and is technically complex. Another approach is treatment with low dose Interleukin-2 (IL-2). Treg cells characteristically express high constitutive levels of the high affinity IL-2 receptor, IL2Rαβγ, which is composed of the subunits IL2Rα (CD25), IL2Rβ (CD122), and IL2Rγ (CD132), and Treg cell growth has been shown to be dependent on IL-2 (Malek, T. R., et al., 2010, Immunity, 33:153-65).

[0104] Conversely, immune activation has also been achieved using IL-2, and recombinant IL-2 (Proleukin®) has been approved to treat certain cancers. High-dose IL-2 is used for the treatment of patients with metastatic melanoma and metastatic renal cell carcinoma with a long-term impact on overall survival.

[0105] Clinical trials of low-dose IL-2 treatment of chronic GVHD (Koreth, J., et al., 2011, N Engl J Med., 365:2055-66) and HCV-associated autoimmune vasculitis patients (Saadoun, D., et al., 2011, N Engl J Med., 365:2067-77) have demonstrated increased Treg levels and signs of clinical efficacy. New clinical trials investigating the efficacy of IL-2 in multiple other autoimmune and inflammatory diseases have been initiated. The rationale for using so-called low dose IL-2 was to exploit the high IL-2 affinity of the trimeric IL-2 receptor which is constitutively expressed on Tregs while leaving other T cells which do not express the high affinity receptor in the inactivated state. Aldesleukin (marketed as Proleukin® by Prometheus Laboratories, San Diego, Calif.), the recombinant form of IL-2 used in these trials, is associated with high toxicity. Aldesleukin, at high doses, is approved for the treatment of metastatic melanoma and metastatic renal cancer, but its side effects are so severe that its use is only recommended in a hospital setting with access to intensive care (Web address: www.proleukin.com/assets/pdf/proleukin.pdf).

[0106] The clinical trials of IL-2 in autoimmune diseases have employed lower doses of IL-2 in order to target Treg cells, because Treg cells respond to lower concentrations of IL-2 than many other immune cell types due to their expression of IL2R alpha (Klatzmann D, 2015 Nat Rev Immunol. 15:283-94). However, even these lower doses resulted in safety and tolerability issues, and the treatments used have employed daily subcutaneous injections, either chronically or in intermittent 5-day treatment courses. Therefore, there is a need for an autoimmune disease therapy that potentiates Treg cell numbers and function, that targets Treg cells more specifically than IL-2, that is safer and more tolerable, and that is administered less frequently.

[0107] One approach that has been suggested for improving the therapeutic index of IL-2-based therapy for autoimmune diseases is to use variants of IL-2 that are selective for Treg cells relative to other immune cells. IL-2 receptors are expressed on a variety of different immune cell types, including T cells, NK cells, eosinophils, and monocytes, and this broad expression pattern likely contributes to its pleiotropic effect on the immune system and high systemic toxicity. In particular, activated T effector cells express IL2Rαβγ, as do pulmonary epithelial cells. But, activating T effector cells runs directly counter to the goal of down-modulating and controlling an immune response, and activating pulmonary epithelial cells leads to known dose-limiting side effects of IL-2 including pulmonary edema. In fact, the major side effect of high-dose IL-2 immunotherapy is vascular leak syndrome (VLS), which leads to accumulation of intravascular fluid in organs such as lungs and liver with subsequent pulmonary edema and liver cell damage. There is no treatment of VLS other than withdrawal of IL-2. Low-dose IL-2 regimens have been tested in patients to avoid VLS, however, at the expense of suboptimal therapeutic results.

[0108] According to the literature, VLS is believed to be caused by the release of proinflammatory cytokines from IL-2-activated NK cells. However, there is some evidence that pulmonary edema results from direct binding of IL-2 to lung endothelial cells, which expressed low to intermediate levels of functional αβγ IL-2Rs. And, the pulmonary edema associated with interaction of IL-2 with lung endothelial cells was abrogated by blocking binding to CD25 with an anti-CD25 monoclonal antibody (mAb), in CD25-deficient host mice, or by the use of CD122-specific IL-2/anti-IL-2 mAb (IL-2/mAb) complexes, thus preventing VLS.

[0109] Treatment with interleukin cytokines other than IL-2 has been more limited. IL-15 displays immune cell stimulatory activity similar to that of IL-2 but without the same inhibitory effects, thus making it a promising immunotherapeutic candidate. Clinical trials of recombinant human IL-15 for the treatment of metastatic malignant melanoma or renal cell cancer demonstrated appreciable changes in immune cell distribution, proliferation, and activation and suggested potential antitumor activity (Conlon et. al., 2014). IL-15 is currently in clinical trials to treat various forms of cancer. However, IL-15 therapy is known to be associated with undesired and toxic effects, such as exacerbating certain leukemias, graft-versus-host disease, hypotension, thrombocytopenia, and liver injury. (Mishra A., et al., Cance Cell, 2012, 22(5):645-55; Alpdogan O. et al., Blood, 2005, 105(2):866-73; Conlon KC et al., J Clin Oncol, 2015, 33(1):74-82.)

[0110] IL-7 promotes lymphocyte development in the thymus and maintains survival of naive and memory T cell homeostasis in the periphery. Moreover, it is important for the organogenesis of lymph nodes (LN) and for the maintenance of activated T cells recruited into the secondary lymphoid organs (SLOs) (Gao et. al., 2015). In clinical trials of IL-7, patients receiving IL-7 showed increases in both CD4+ and CD8+ T cells, with no significant increase in regulatory T cell numbers as monitored by FoxP3 expression (Sportes et al., 2008). In clinical trials reported in 2006, 2008 and 2010, patients with different kinds of cancers such as metastatic melanoma or sarcoma were injected subcutaneously with different doses of IL-7. Little toxicity was seen except for transient fevers and mild erythema. Circulating levels of both CD4+ and CD8+ T cells increased significantly and the number of Treg reduced. TCR repertoire diversity increased after IL-7 therapy. However, the anti-tumor activity of IL-7 was not well evaluated (Gao et. al., 2015). Results suggest that IL-7 therapy could enhance and broaden immune responses.

[0111] IL-12 is a pleiotropic cytokine, the actions of which create an interconnection between the innate and adaptive immunity. IL-12 was first described as a factor secreted from PMA-induced EBV-transformed B-cell lines. Based on its actions, IL-12 has been designated as cytotoxic lymphocyte maturation factor and natural killer cell stimulatory factor. Due to bridging the innate and adaptive immunity and potently stimulating the production of IFNγ, a cytokine coordinating natural mechanisms of anticancer defense, IL-12 seemed ideal candidate for tumor immunotherapy in humans. However, severe side effects associated with systemic administration of IL-12 in clinical investigations and the very narrow therapeutic index of this cytokine markedly tempered enthusiasm for the use of this cytokine in cancer patients (Lasek et. al., 2014). Approaches to IL-12 therapy in which delivery of the cytokine is tumor-targeted, which may diminish some of the previous issues with IL-12 therapy, are currently in clinical trials for cancers.

[0112] The direct use of IL-2 as an agonist to bind the IL-2R and modulate immune responses therapeutically has been problematic due its well-documented therapeutic risks, e.g., its short serum half-life and high toxicity. These risks have also limited the therapeutic development and use of other cytokines. New forms of cytokines that reduce these risks are needed. Disclosed herein are compositions and methods comprising IL-2 and IL-15 and other cytokines, functional fragments and muteins of cytokines as well as conditionally active cytokines designed to address these risks and provide needed immunomodulatory therapeutics.

[0113] The present invention is designed to address the shortcomings of direct IL-2 therapy and therapy using other cytokines, for example using cytokine blocking moieties, e.g. steric blocking polypeptides, serum half-life extending polypeptides, targeting polypeptides, linking polypeptides, including protease cleavable linkers, and combinations thereof. Cytokines, including interleukins (e.g., IL-2, IL-7, IL-12, IL-15, IL-18, IL-21 IL-23), interferons (IFNs, including IFNalpha, IFNbeta and IFNgamma), tumor necrosis factors (e.g., TNFalpha, lymphotoxin), transforming growth factors (e.g., TGFbeta1l, TGFbeta2, TGFbeta3), chemokines (C-X-C motif chemokine 10 (CXCL10), CCL19, CCL20, CCL21), and granulocyte macrophage-colony stimulating factor (GM-CS) are highly potent when administered to patients. As used herein, “chemokine” means a family of small cytokines with the ability to induce directed chemotaxis in nearby responsive cells Cytokines can provide powerful therapy, but are accompanied by undesired effects that are difficult to control clinically and which have limited the clinical use of cytokines. This disclosure relates to new forms of cytokines that can be used in patients with reduced or eliminated undesired effects. In particular, this disclosure relates to pharmaceutical compositions including chimeric polypeptides (fusion proteins), nucleic acids encoding fusion proteins and pharmaceutical formulations of the foregoing that contain cytokines or active fragments or muteins of cytokines that have decreased cytokine receptor activating activity in comparison to the corresponding cytokine. However, under selected conditions or in a selected biological environment the chimeric polypeptides activate their cognate receptors, often with the same or higher potency as the corresponding naturally occurring cytokine. As described herein, this is typically achieved using a cytokine blocking moiety that blocks or inhibits the receptor activating function of the cytokine, active fragment or mutein thereof under general conditions but not under selected conditions, such as those present at the desired site of cytokine activity (e.g., an inflammatory site ora tumor).

[0114] The chimeric polypeptides and nucleic acids encoding the chimeric polypeptides can be made using any suitable method. For example, nucleic acids encoding a chimeric polypeptide can be made using recombinant DNA techniques, synthetic chemistry or combinations of these techniques, and expressed in a suitable expression system, such as in CHO cells. Chimeric polypeptides can similarly be made, for example by expression of a suitable nucleic acid, using synthetic or semi-synthetic chemical techniques, and the like. In some embodiments, the blocking moiety can be attached to the cytokine polypeptide via sortase-mediated conjugation. “Sortases” are transpeptidases that modify proteins by recognizing and cleaving a carboxyl-terminal sorting signal embedded in or terminally attached to a target protein or peptide. Sortase A catalyzes the cleavage of the LPXTG motif (SEQ ID No.: 442) (where X is any standard amino acid) between the Thr and Gly residue on the target protein, with transient attachment of the Thr residue to the active site Cys residue on the enzyme, forming an enzyme-thioacyl intermediate. To complete transpeptidation and create the peptide-monomer conjugate, a biomolecule with an N-terminal nucleophilic group, typically an oligoglycine motif, attacks the intermediate, displacing Sortase A and joining the two molecules.

[0115] To form the cytokine-blocking moiety fusion protein, the cytokine polypeptide is first tagged at the N-terminus with a polyglycine sequence, or alternatively, with at the C-terminus with a LPXTG motif (SEQ ID NO.: 442). The blocking moiety or other element has respective peptides attached that serve as acceptor sites for the tagged polypeptides. For conjugation to domains carrying a LPXTG (SEQ ID NO.: 442) acceptor peptide attached via its N-terminus, the polypeptide will be tagged with an N-terminal poly-glycine stretch. For conjugation to domain carrying a poly-glycine peptide attached via its C-terminus, the polypeptide will be tagged at its C-terminus with a LPXTG (SEQ ID NO.: 442) sortase recognition sequence. Recognizing poly-glycine and LPXTG (SEQ ID NO.: 442) sequences, sortase will form a peptide bond between polymer-peptide and tagged polypeptides. The sortase reaction cleaves off glycine residues as intermediates and occurs at room temperature.

[0116] A variety of mechanisms can be exploited to remove or reduce the inhibition caused by the blocking moiety. For example, the pharmaceutical compositions can include a cytokine moiety and a blocking moiety, e.g. a steric blocking moiety, with a protease cleavable linker comprising a protease cleavage site located between the cytokine and cytokine blocking moiety or within the cytokine blocking moiety. When the protease cleavage site is cleaved, the blocking moiety can dissociate from cytokine, and the cytokine can then activate cytokine receptor. A cytokine moiety can also be blocked by a specific blocking moiety, such as an antibody, which binds an epitope found on the relevant cytokine.

[0117] Any suitable linker can be used. For example, the linker can comprise glycine-glycine, a sortase-recognition motif, or a sortase-recognition motif and a peptide sequence (Gly₄Ser)ₙ. (SEQ ID NO.: 443) or (Gly₃Ser)ₙ, (SEQ ID NO.: 444) wherein n is 1, 2, 3, 4 or 5. Typically, the sortase-recognition motif comprises a peptide sequence LPXTG (SEQ ID NO.: 442), where X is any amino acid. In some embodiments, the covalent linkage is between a reactive lysine residue attached to the C-terminal of the cytokine polypeptide and a reactive aspartic acid attached to the N-terminal of the blocker or other domain. In other embodiments, the covalent linkage is between a reactive aspartic acid residue attached to the N-terminal of the cytokine polypeptide and a reactive lysine residue attached to the C-terminal of said blocker or other domain.

[0118] Accordingly, as described in detail herein, the cytokine blocking moieties used can be steric blockers. As used herein, a “steric blocker” refers to a polypeptide or polypeptide moiety that can be covalently bonded to a cytokine polypeptide directly or indirectly through other moieties such as linkers, for example in the form of a chimeric polypeptide (fusion protein), but otherwise does not covalently bond to the cytokine polypeptide. A steric blocker can non-covalently bond to the cytokine polypeptide, for example though electrostatic, hydrophobic, ionic or hydrogen bonding. A steric blocker typically inhibits or blocks the activity of the cytokine moiety due to its proximity to the cytokine moiety and comparative size. The steric inhibition of the cytokine moiety can be removed by spatially separating the cytokine moiety from the steric blocker, such as by enzymatically cleaving a fusion protein that contains a steric blocker and a cytokine polypeptide at a site between the steric blocker and the cytokine polypeptide.

[0119] As described in greater detail herein, the blocking function can be combined with or due to the presence of additional functional components in the pharmaceutical composition, such as a targeting domain, a serum half-life extension element, and protease-cleavable linking polypeptides. For example, a serum half-life extending polypeptide can also be a steric blocker.

[0120] In the interest of presenting a concise disclosure of the full scope of the invention, aspects of the invention are described in detail using the cytokine IL-2 as an exemplary cytokine. However, the invention and this disclosure are not limited to IL-2. It will be clear to a person of skill in the art that this disclosure, including the disclosed methods, polypeptides and nucleic acids, adequately describes and enables the use of other cytokines, fragments and muteins, such as IL-2, IL-7, IL-12, IL-15, IL-18, IL-21 IL-23, IFNalpha, IFNbeta, IFNgamma, TNFalpha, lymphotoxin, TGF-beta1, TGFbeta2, TGFbeta3, GM-CSF, CXCL10, CCL19, CCL20, CCL21 and functional fragments or muteins of any of the foregoing.

[0121] Various elements ensure the delivery and activity of IL-2 preferentially at the site of desired IL-2 activity and to severely limit systemic exposure to the interleukin via a blocking and/or a targeting strategy preferentially linked to a serum half-life extension strategy. In this serum half-life extension strategy, the blocked version of interleukin circulates for extended times (preferentially 1-2 or more weeks) but the activated version has the typical serum half-life of the interleukin.

[0122] By comparison to a serum half-life extended version, the serum half-life of IL-2 administered intravenously is only ˜10 minutes due to distribution into the total body extracellular space, which is large, ˜15 L in an average sized adult. Subsequently, IL-2 is metabolized by the kidneys with a half-life of ∧2.5 hours. (Smith, K. “Interleukin 2 immunotherapy.” Therapeutic Immunology 240 (2001)). By other measurements, IL-2 has a very short plasma half-life of 85 minutes for intravenous administration and 3.3 hours subcutaneous administration (Kirchner, G. I., et al., 1998, Br J Clin Pharmacol. 46:5-10). In some embodiments of this invention, the half-life extension element is linked to the interleukin via a linker which is cleaved at the site of action (e.g. by inflammation-specific or tumor-specific proteases) releasing the interleukin's full activity at the desired site and also separating it from the half-life extension of the uncleaved version. In such embodiments, the fully active and free interleukin would have very different pharmacokinetic (pK) properties—a half-life of hours instead of weeks. In addition, exposure to active cytokine is limited to the site of desired cytokine activity (e.g., an inflammatory site or tumor) and systemic exposure to active cytokine, and associated toxicity and side effects, are reduced.

[0123] Other cytokines envisioned in this invention have similar pharmacology (e.g. IL-15 as reported by Blood 2011 117:4787-4795; doi: doi.org/10.1182/blood-2010-10-311456) as IL-2 and accordingly, the designs of this invention address the shortcomings of using these agents directly, and provide chimeric polypeptides that can have extended half-life and/or be targeted to a site of desired activity (e.g., a site of inflammation or a tumor).

[0124] If desired, IL-2 can be engineered to bind the IL-2R complex generally or one of the three IL-2R subunits specifically with an affinity that differs from that of the corresponding wild-type IL-2, for example to selectively activate Tregs or Teff. For example, IL-2 polypeptides that are said to have higher affinity for the trimeric form of the IL-2 receptor relative to the dimeric beta/gamma form of the 11-2 receptor in comparison to wild type IL-2 can have an amino acid sequence that includes one of the following sets of mutations with respect to SEQ ID NO:1 (a mature IL-2 protein comprising amino acids 21-153 of human IL-2 having the Uniprot Accession No. P60568-1): (a) K64R, V69A, and Q74P; (b) V69A, Q74P, and T101A; (c) V69A, Q74P, and I128T; (d) N30D, V69A, Q74P, and F103; (e) K49E, V69A, A73V, and K76E; (f) V69A, Q74P, T101A, and T133N; (g) N305, V69A, Q74P, and I128A; (h) V69A, Q74P, N88D, and S99P; (i) N30S, V69A, Q74P, and I128T; (j) K9T, Q11R, K35R, V69A, and Q74P; (k) A1T, M46L, K49R, E61D, V69A, and H79R; (1) K48E, E68D, N71T, N90H, F103S, and I114V; (m) S4P, T10A, Q11R, V69A, Q74P, N88D, and T133A; (n) E15K, N30S Y31H, K35R, K48E, V69A, Q74P, and I92T; (o) N30S, E68D, V69A, N71A, Q74P, S75P, K76R, and N90H; (p) N30S, Y31C, T37A, V69A, A73V, Q74P, H79R, and I128T; (q) N26D, N29S, N30S, K54R, E67G, V69A, Q74P, and I92T; (r) K8R, Q13R, N26D, N30T, K35R, T37R, V69A, Q74P, and I92T; and (s) N29S, Y31H, K35R, T37A, K48E, V69A, N71R, Q74P, N88D, and I89V. This approach can also be applied to prepare muteins of other cytokines including interleukins (e.g., IL-2, IL-7, IL-12, IL-15, IL-18, IL-23), interferons (IFNs, including IFNalpha, IFNbeta and IFNgamma), tumor necrosis factors (e.g., TNFalpha, lymphotoxin), transforming growth factors (e.g., TGFbeta1, TGFbeta2, TGFbeta3) and granulocyte macrophage-colony stimulating factor (GM-CS). For example, muteins can be prepared that have desired binding affinity for a cognate receptor.

[0125] As noted above, any of the mutant IL-2 polypeptides disclosed herein can include the sequences described; they can also be limited to the sequences described and otherwise identical to SEQ ID NO:1. Moreover, any of the mutant IL-2 polypeptides disclosed herein can optionally include a substitution of the cysteine residue at position 125 with another residue (e.g., serine) and/or can optionally include a deletion of the alanine residue at position 1 of SEQ ID NO:1.

[0126] Another approach to improving the therapeutic index of an IL-2 based therapy is to optimize the pharmacokinetics of the molecule to maximally activate Treg cells. Early studies of IL-2 action demonstrated that IL-2 stimulation of human T cell proliferation in vitro required a minimum of 5-6 hours exposure to effective concentrations of IL-2 (Cantrell, D. A., et. al., 1984, Science, 224: 1312-1316). When administered to human patients, IL-2 has a very short plasma half-life of 85 minutes for intravenous administration and 3.3 hours subcutaneous administration (Kirchner, G. I., et al., 1998, Br J Clin Pharmacol. 46:5-10). Because of its short half-life, maintaining circulating IL-2 at or above the level necessary to stimulate T cell proliferation for the necessary duration necessitates high doses that result in peak IL-2 levels significantly above the EC50 for Treg cells or will require frequent administration. These high IL-2 peak levels can activate IL2Rβγ receptors and have other unintended or adverse effects, for example VLS as noted above. An IL-2 analog, or a multifunctional protein with IL-2 attached to a domain that enables binding to the FcRn receptor, with a longer circulating half-life than IL-2 can achieve a target drug concentration for a specified period of time at a lower dose than IL-2, and with lower peak levels. Such an IL-2 analog will therefore require either lower doses or less frequent administration than IL-2 to effectively stimulate Treg cells. Less frequent subcutaneous administration of an IL-2 drug will also be more tolerable for patients. A therapeutic with these characteristics will translate clinically into improved pharmacological efficacy, reduced toxicity, and improved patient compliance with therapy. Alternatively, IL-2 or muteins of IL-2 (herein, “IL-2*”) can be selectively targeted to the intended site of action (e.g. sites of inflammation or a tumor). This targeting can be achieved by one of several strategies, including the addition of domains to the administered agent that comprise blockers of the IL-2 (or muteins) that are cleaved away or by targeting domains or a combination of the two.

[0127] In some embodiments, IL-2* partial agonists can be tailored to bind with higher or lower affinity depending on the desired target; for example, an IL-2* can be engineered to bind with enhanced affinity to one of the receptor subunits and not the others. These types of partial agonists, unlike full agonists or complete antagonists, offer the ability to tune the signaling properties to an amplitude that elicits desired functional properties while not meeting thresholds for undesired properties. Given the differential activities of the partial agonists, a repertoire of IL-2 variants could be engineered to exhibit an even finer degree of distinctive signaling activities, ranging from almost full to partial agonism to complete antagonism.

[0128] In some embodiments, the IL-2* has altered affinity for IL-2Rα. In some embodiments, the IL-2* has a higher affinity for IL-2Rα than wild-type IL-2. In other embodiments, the IL-2* has altered affinity for IL-2Rβ. In one embodiment, IL-2* has enhanced binding affinity for IL-2Rβ, e.g., the N-terminus of IL-2Rβ, that eliminates the functional requirement for IL-2Rα. In another embodiment, an IL-2* is generated that has increased binding affinity for IL-2Rβ but that exhibited decreased binding to IL-2Rγ, and thereby is defective IL-2Rβ heterodimerization and signaling.

[0129] Blocking moieties, described in further detail below, can also be used to favor binding to or activation of one or more receptors. In one embodiment, blocking moieties are added such that IL-2Rβγ binding or activation is blocked but IL-2Rα binding or activation is not changed. In another embodiment, blocking moieties are added such that IL-2Rα binding or activation is diminished. In another embodiment, blocking moieties are added such that binding to and or activation of all three receptors is inhibited. This blocking may be relievable by removal of the blocking moieties in a particular environment, for example by proteolytic cleavage of a linker linking one or more blocking moieties to the cytokine.

[0130] A similar approach can be applied to improve other cytokines, particularly for use as immunostimulatory agents, for example for treating cancer. For example, in this aspect, the pharmacokinetics and/or pharmacodynamics of the cytokine (e.g., IL-2, IL-7, IL-12, IL-15, IL-18, IL-21 IL-23, IFNalpha, IFNbeta and IFNgamma, TNFalpha, lymphotoxin, TGFbeta1, TGFbeta2, TGFbeta3 GM-CSF, CXCL10, CCL19, CCL20, and CCL21 can be tailored to maximally activate effector cells (e.g., effect T cells, NK cells) and/or cytotoxic immune response promoting cells (e.g., induce dendritic cell maturation) at a site of desired activity, such as in a tumor, but preferably not systemically.

[0131] Thus, provided herein are pharmaceutical compositions comprising at least one cytokine polypeptide, such as interleukins (e.g., IL-2, IL-7, IL-12, IL-15, IL-18, IL-21, IL-23), interferons (IFNs, including IFNalpha, IFNbeta and IFNgamma), tumor necrosis factors (e.g., TNFalpha, lymphotoxin), transforming growth factors (e.g., TGFbeta1, TGFbeta2, TGFbeta3), chemokines (e.g. CXCL10, CCL19, CCL20, CCL21) and granulocyte macrophage-colony stimulating factor (GM-CS) or a functional fragment or mutein of any of the foregoing. The polypeptide typically also includes at least one linker amino acid sequence, wherein the amino acid sequence is in certain embodiments capable of being cleaved by an endogenous protease. In one embodiment, the linker comprises an amino acid sequence comprising HSSKLQ (SEQ ID NO.: 25), GPLGVRG (SEQ ID NO.: 445), IPVSLRSG (SEQ ID NO.: 446), VPLSLYSG (SEQ ID NO. 447), or SGESPAYYTA (SEQ ID NO. 448). In other embodiments, the chimeric polypeptide further contains a blocking moiety, e.g. a steric blocking polypeptide moiety, capable of blocking the activity of the interleukin polypeptide. The blocking moiety, for example, can comprise a human serum albumin (HSA) binding domain or an optionally branched or multi-armed polyethylene glycol (PEG). Alternatively, the pharmaceutical composition comprises a first cytokine polypeptide or a fragment thereof, and blocking moiety, e.g. a steric blocking polypeptide moiety, wherein the blocking moiety blocks the activity of the cytokine polypeptide on the cytokine receptor, and wherein the blocking moiety in certain embodiments comprises a protease cleavable domain. In some embodiments, blockade and reduction of cytokine activity is achieved simply by attaching additional domains with very short linkers to the N or C terminus of the interleukin domain. In such embodiments, it is anticipated the blockade is relieved by protease digestion of the blocking moiety or of the short linker that tethers the blocker to the interleukin. Once the domain is clipped or is released, it will no longer be able to achieve blockade of cytokine activity.

[0132] The pharmaceutical composition e.g., chimeric polypeptide can comprise two or more cytokines, which can be the same cytokine polypeptide or different cytokine polypeptides. For example, the two or more different types of cytokines have complementary functions. In some examples, a first cytokine is IL-2 and a second cytokine is IL-12. In some embodiments, each of the two or more different types of cytokine polypeptides have activities that modulate the activity of the other cytokine polypeptides. In some examples of chimeric polypeptides that contain two cytokine polypeptides, a first cytokine polypeptide is T-cell activating, and a second cytokine polypeptide is non-T-cell-activating. In some examples of chimeric polypeptides that contain two cytokine polypeptides, a first cytokine is a chemoattractant, e.g. CXCL10, and a second cytokine is an immune cell activator.

[0133] Preferably, the cytokine polypetides (including functional fragments) that are included in the fusion proteins disclosed herein are not mutated or engineered to alter the properties of the naturally occurring cytokine, including receptor binding affinity and specificity or serum half-life. However, changes in amino acid sequence from naturally occurring (including wild type) cytokine are acceptable to facilitate cloning and to achieve desired expression levels, for example.

### Blocking Moiety

[0134] The blocking moiety can be any moiety that inhibits the ability of the cytokine to bind and/or activate its receptor. The blocking moiety can inhibit the ability of the cytokine to bind and/or activate its receptor sterically blocking and/or by noncovalently binding to the cytokine. Examples of suitable blocking moieties include the full length or a cytokine-binding fragment or mutein of the cognate receptor of the cytokine. Antibodies and fragments thereof including, a polyclonal antibody, a recombinant antibody, a human antibody, a humanized antibody a single chain variable fragment (scFv), single-domain antibody such as a heavγ chain variable domain (VH), a light chain variable domain (VL) and a variable domain of camelid-type nanobody (VHH), a dAb and the like that bind the cytokine can also be used. Other suitable antigen-binding domain that bind the cytokine can also be used, include non-immunoglobulin proteins that mimic antibody binding and/or structure such as, anticalins, affilins, affibody molecules, affimers, affitins, alphabodies, avimers, DARPins, fynomers, kunitz domain peptides, monobodies, and binding domains based on other engineered scaffolds such as SpA, GroEL, fibronectin, lipocallin and CTLA4 scaffolds. Further examples of suitable blocking polypeptides include polypeptides that sterically inhibit or block binding of the cytokine to its cognate receptor. Advantageously, such moieties can also function as half-life extending elements. For example, a peptide that is modified by conjugation to a water-soluble polymer, such as PEG, can sterically inhibit or prevent binding of the cytokine to its receptor. Polypeptides, or fragments thereof, that have long serum half-lives can also be used, such as serum albumin (human serum albumin), immunoglobulin Fc, transferrin and the like, as well as fragments and muteins of such polypeptides. Antibodies and antigen-binding domains that bind to, for example, a protein with a long serum half-life such as HSA, immunoglobulin or transferrin, or to a receptor that is recycled to the plasma membrane, such as FcRn or transferrin receptor, can also inhibit the cytokine, particularly when bound to their antigen. Examples of such antigen-binding polypeptides include a single chain variable fragment (scFv), single-domain antibody such as a heavγ chain variable domain (VH), a light chain variable domain (VL) and a variable domain of camelid-type nanobody (VHH), a dAb and the like. Other suitable antigen-binding domain that bind the cytokine can also be used, include non-immunoglobulin proteins that mimic antibody binding and/or structure such as, anticalins, affilins, affibody molecules, affimers, affitins, alphabodies, avimers, DARPins, fynomers, kunitz domain peptides, monobodies, and binding domains based on other engineered scaffolds such as SpA, GroEL, fibronectin, lipocallin and CTLA4 scaffolds.

[0135] In illustrative examples, when IL-2 is the cytokine in the chimeric polypeptide, the blocking moiety can be the full length or fragment or mutein of the alpha chain of IL-2 receptor (IL-2Rα) or beta (IL-2Rβ) or gamma chain of IL-2 receptor (IL-2Rγ), an anti-IL-2 single-domain antibody (dAb) or scFv, a Fab, an anti-CD25 antibody or fragment thereof, and anti-HAS dAb or scFv, and the like.

### In Vivo Half-life Extension Elements

[0136] Preferably, the chimeric polypeptides comprise an in vivo half-life extension element. Increasing the in vivo half-life of therapeutic molecules with naturally short half-lives allows for a more acceptable and manageable dosing regimen without sacrificing effectiveness. As used herein, a “half-life extension element” is a part of the chimeric polypeptide that increases the in vivo half-life and improve pK, for example, by altering its size (e.g., to be above the kidney filtration cutoff), shape, hydrodynamic radius, charge, or parameters of absorption, biodistribution, metabolism, and elimination. An exemplary way to improve the pK of a polypeptide is by expression of an element in the polypeptide chain that binds to receptors that are recycled to the plasma membrane of cells rather than degraded in the lysosomes, such as the FcRn receptor on endothelial cells and transferrin receptor. Three types of proteins, e.g., human IgGs, HSA (or fragments), and transferrin, persist for much longer in human serum than would be predicted just by their size, which is a function of their ability to bind to receptors that are recycled rather than degraded in the lysosome. These proteins, or fragments of them that retain the FcRn binding are routinely linked to other polypeptides to extend their serum half-life. In one embodiment, the half-life extension element is a human serum albumin (HSA) binding domain. HSA (SEQ ID NO: 2) may also be directly bound to the pharmaceutical compositions or bound via a short linker. Fragments of HSA may also be used. HSA and fragments thereof can function as both a blocking moiety and a half-life extension element. Human IgGs and Fc fragments can also carry out a similar function.

[0137] The serum half-life extension element can also be antigen-binding polypeptide that binds to a protein with a long serum half-life such as serum albumin, transferrin and the like. Examples of such polypeptides include antibodies and fragments thereof including, a polyclonal antibody, a recombinant antibody, a human antibody, a humanized antibody a single chain variable fragment (scFv), single-domain antibody such as a heavγ chain variable domain (VH), a light chain variable domain (VL) and a variable domain of camelid-type nanobody (VHH), a dAb and the like. Other suitable antigen-binding domain include non-immunoglobulin proteins that mimic antibody binding and/or structure such as, anticalins, affilins, affibody molecules, affimers, affitins, alphabodies, avimers, DARPins, fynomers, kunitz domain peptides, monobodies, and binding domains based on other engineered scaffolds such as SpA, GroEL, fibronectin, lipocallin and CTLA4 scaffolds. Further examples of antigen-binding polypeptides include a ligand for a desired receptor, a ligand-binding portion of a receptor, a lectin, and peptides that binds to or associates with one or more target antigens.

[0138] Some preferred serum half-life extension elements are polypeptides that comprise complementarity determining regions (CDRs), and optionally non-CDR loops. Advantageously, such serum half-life extension elements can extend the serum half-life of the cytokine, and also function as inhibitors of the cytokine (e.g., via steric blocking, non-covalent interaction or combination thereof) and/or as targeting domains. In some instances, the serum half-life extension elements are domains derived from an immunoglobulin molecule (Ig molecule) or engineered protein scaffolds that mimic antibody structure and/or binding activity. The Ig may be of any class or subclass (IgG1, IgG2, IgG3, IgG4, IgA, IgE, IgM etc). A polypeptide chain of an Ig molecule folds into a series of parallel beta strands linked by loops. In the variable region, three of the loops constitute the “complementarity determining regions” (CDRs) which determine the antigen binding specificity of the molecule. An IgG molecule comprises at least two heavy (H) chains and two light (L) chains inter-connected by disulfide bonds, or an antigen binding fragment thereof. Each heavy chain is comprised of a heavγ chain variable region (abbreviated herein as VH) and a heavγ chain constant region. The heavγ chain constant region is comprised of three domains, CH1, CH2 and CH3. Each light chain is comprised of a light chain variable region (abbreviated herein as VL) and a light chain constant region. The light chain constant region is comprised of one domain, CL. The VH and VL regions can be further subdivided into regions of hypervariability, termed complementarity determining regions (CDRs) with are hypervariable in sequence and/or involved in antigen recognition and/or usually form structurally defined loops, interspersed with regions that are more conserved, termed framework regions (FR). Each VH and VL is composed of three CDRs and four FRs, arranged from amino-terminus to carboxy-terminus in the following order: FR1, CDR1, FR2, CDR2, FR3, CDR3, FR4. In some embodiments of this disclosure, at least some or all of the amino acid sequences of FR1, FR2, FR3, and FR4 are part of the “non-CDR loop” of the binding moieties described herein. As shown in FIG. 5, a variable domain of an immunoglobulin molecule has several beta strands that are arranged in two sheets. The variable domains of both light and heavy immunoglobulin chains contain three hypervariable loops, or complementarity-determining regions (CDRs). The three CDRs of a V domain (CDR1, CDR2, CDR3) cluster at one end of the beta barrel. The CDRs are the loops that connect beta strands B-C, C′-C″, and F-G of the immunoglobulin fold, whereas the bottom loops that connect beta strands AB, CC', C″ -D and E-F of the immunoglobulin fold, and the top loop that connects the D-E strands of the immunoglobulin fold are the non-CDR loops. In some embodiments of this disclosure, at least some amino acid residues of a constant domain, CH1, CH2, or CH3, are part of the “non-CDR loop” of the binding moieties described herein. Non-CDR loops comprise, in some embodiments, one or more of AB, CD, EF, and DE loops of a Cl-set domain of an Ig or an Ig-like molecule; AB, CC', EF, FG, BC, and EC' loops of a C2-set domain of an Ig or an Ig-like molecule; DE, BD, GF, A(A1A2)B, and EF loops of I(Intermediate)-set domain of an Ig or Ig-like molecule.

[0139] Within the variable domain, the CDRs are believed to be responsible for antigen recognition and binding, while the FR residues are considered a scaffold for the CDRs. However, in certain cases, some of the FR residues play an important role in antigen recognition and binding. Framework region residues that affect Ag binding are divided into two categories. The first are FR residues that contact the antigen, thus are part of the binding-site, and some of these residues are close in sequence to the CDRs. Other residues are those that are far from the CDRs in sequence, but are in close proximity to it in the 3-D structure of the molecule, e.g., a loop in heavγ chain.

[0140] The binding moieties are any kinds of polypeptides. For example, in certain instances the binding moieties are natural peptides, synthetic peptides, or fibronectin scaffolds, or engineered bulk serum proteins. The bulk serum protein comprises, for example, albumin, fibrinogen, or a globulin. In some embodiments, the binding moieties are engineered scaffolds. Engineered scaffolds comprise, for example, sdAb, a scFv, a Fab, a VHH, a fibronectin type III domain, immunoglobulin-like scaffold (as suggested in Halaby et al., 1999. Prot Eng 12(7):563-571), DARPin, cystine knot peptide, lipocalin, three-helix bundle scaffold, protein G-related albumin-binding module, or a DNA or RNA aptamer scaffold.

[0141] In some cases, the serum half-life extending element comprises a binding site for a bulk serum protein. In some embodiments, the CDRs provide the binding site for the bulk serum protein. The bulk serum protein is, in some examples, a globulin, albumin, transferrin, IgG1, IgG2, IgG4, IgG3, IgA monomer, Factor XIII, Fibrinogen, IgE, or pentameric IgM. In some embodiments, the CDR form a binding site for an immunoglobulin light chain, such as an Igκ free light chain or an Igλ, free light chain.

[0142] The serum half-life extension element can be any type of binding domain, including but not limited to, domains from a monoclonal antibody, a polyclonal antibody, a recombinant antibody, a human antibody, a humanized antibody. In some embodiments, the binding moiety is a single chain variable fragment (scFv), single-domain antibody such as a heavγ chain variable domain (VH), a light chain variable domain (VL) and a variable domain (VHH) of camelid derived nanobody. In other embodiments, the binding moieties are non-Ig binding domains, i.e., antibody mimetic, such as anticalins, affilins, affibody molecules, affimers, affitins, alphabodies, avimers, DARPins, fynomers, kunitz domain peptides, and monobodies.

[0143] In other embodiments, the serum half-life extension element can be a water-soluble polymer or a peptide that is conjugated to a water-soluble polymer, such as PEG. “PEG,” “polyethylene glycol” and “poly(ethylene glycol)” as used herein, are interchangeable and encompass any nonpeptidic water-soluble poly(ethylene oxide). The term “PEG” also means a polymer that contains a majority, that is to say, greater than 50%, of —OCH₂CH₂— repeating subunits. With respect to specific forms, the PEG can take any number of a variety of molecular weights, as well as structures or geometries such as “branched,” “linear,” “forked,” “multifunctional,” and the like, to be described in greater detail below. The PEG is not limited to a particular structure and can be linear (e.g., an end capped, e.g., alkoxy PEG or a bifunctional PEG), branched or multi-armed (e.g., forked PEG or PEG attached to a polyol core), a dendritic (or star) architecture, each with or without one or more degradable linkages. Moreover, the internal structure of the PEG can be organized in any number of different repeat patterns and can be selected from the group consisting of homopolymer, alternating copolymer, random copolymer, block copolymer, alternating tripolymer, random tripolymer, and block tripolymer. PEGs can be conjugated to polypeptide and peptides through any suitable method. Typically a reactive PEG derivative, such as N-hydroxysuccinamidyl ester PEG, is reacted with a peptide or polypeptide that includes amino acids with a side chain that contains an amine, sulfhydryl, carboxylic acid or hydroxyl functional group, such as cysteine, lysine, asparagine, glutamine, theonine, tyrosine, serine, aspartic acid, and glutamic acid.

### Targeting and Retention Domains

[0144] For certain applications, it may be desirable to maximize the amount of time the construct is present in its desired location in the body. This can be achieved by including one further domain in the chimeric polypeptide (fusion protein) to influence its movements within the body. For example, the chimeric nucleic acids can encode a domain that directs the polypeptide to a location in the body, e.g., tumor cells or a site of inflammation; this domain is termed a “targeting domain” and/or encode a domain that retains the polypeptide in a location in the body, e.g., tumor cells or a site of inflammation; this domain is termed a “retention domain”. In some embodiments a domain can function as both a targeting and a retention domain. In some embodiments, the targeting domain and/or retention domain are specific to a protease-rich environment. In some embodiments, the encoded targeting domain and/or retention domain are specific for regulatory T cells (Tregs), for example targeting the CCR4 or CD39 receptors. Other suitable targeting and/or retention domains comprise those that have a cognate ligand that is overexpressed in inflamed tissues, e.g., the IL-1 receptor, or the IL-6 receptor. In other embodiments, the suitable targeting and/or retention domains comprise those who have a cognate ligand that is overexpressed in tumor tissue, e.g., Epcam, CEA or mesothelin. In some embodiments, the targeting domain is linked to the interleukin via a linker which is cleaved at the site of action (e.g. by inflammation or cancer specific proteases) releasing the interleukin full activity at the desired site. In some embodiments, the targeting and/or retention domain is linked to the interleukin via a linker which is not cleaved at the site of action (e.g. by inflammation or cancer specific proteases), causing the cytokine to remain at the desired site.

[0145] Antigens of choice, in some cases, are expressed on the surface of a diseased cell or tissue, for example a tumor or a cancer cell. Antigens useful for tumor targeting and retention include but are not limited to EpCAM, EGFR, HER-2, HER-3, c-Met, FOLR1, and CEA. Pharmaceutical compositions disclosed herein, also include proteins comprising two targeting and/or retention domains that bind to two different target antigens known to be expressed on a diseased cell or tissue. Exemplary pairs of antigen binding domains include but are not limited to EGFR/CEA, EpCAM/CEA, and HER-2/HER-3.

[0146] Suitable targeting and/or retention domains include antigen-binding domains, such as antibodies and fragments thereof including, a polyclonal antibody, a recombinant antibody, a human antibody, a humanized antibody a single chain variable fragment (scFv), single-domain antibody such as a heavγ chain variable domain (VH), a light chain variable domain (VL) and a variable domain of camelid-type nanobody (VHH), a dAb and the like. Other suitable antigen-binding domain include non-immunoglobulin proteins that mimic antibody binding and/or structure such as, anticalins, affilins, affibody molecules, affimers, affitins, alphabodies, avimers, DARPins, fynomers, kunitz domain peptides, monobodies, and binding domains based on other engineered scaffolds such as SpA, GroEL, fibronectin, lipocallin and CTLA4 scaffolds. Further examples of antigen-binding polypeptides include a ligand for a desired receptor, a ligand-binding portion of a receptor, a lectin, and peptides that binds to or associates with one or more target antigens.

[0147] In some embodiments, the targeting and/or retention domains specifically bind to a cell surface molecule. In some embodiments, the targeting and/or retention domains specifically bind to a tumor antigen. In some embodiments, the targeting polypeptides specifically and independently bind to a tumor antigen selected from at least one of Fibroblast activation protein alpha (FAPa), Trophoblast glycoprotein (5T4), Tumor-associated calcium signal transducer 2 (Trop2), Fibronectin EDB (EDB-FN), fibronectin EIIIB domain, CGS-2, EpCAM, EGFR, HER-2, HER-3, cMet, CEA, and FOLR1. In some embodiments, the targeting polypeptides specifically and independently bind to two different antigens, wherein at least one of the antigens is a tumor antigen selected from EpCAM, EGFR, HER-2, HER-3, cMet, CEA, and FOLR1.

[0148] The targeting and/or retention antigen can be a tumor antigen expressed on a tumor cell. Tumor antigens are well known in the art and include, for example, EpCAM, EGFR, HER-2, HER-3, c-Met, FOLR1, PSMA, CD38, BCMA, and CEA. 5T4, AFP, B7-H3, Cadherin-6, CAIX, CD117, CD123, CD138, CD166, CD19, CD20, CD205, CD22, CD30, CD33, CD352, CD37, CD44, CD52, CD56, CD70, CD71, CD74, CD79b, DLL3, EphA2, FAP, FGFR2, FGFR3, GPC3, gpA33, FLT-3, gpNMB, HPV-16 E6, HPV-16 E7, ITGA2, ITGA3, SLC39A6, MAGE, mesothelin, Mucl, Muc16, NaPi2b, Nectin-4, P-cadherin, NY-ESO-1, PRLR, PSCA, PTK7, ROR1, SLC44A4, SLTRK5, SLTRK6, STEAP1, TIM1, Trop2, WT1.

[0149] The targeting and/or retention antigen can be an immune checkpoint protein. Examples of immune checkpoint proteins include but are not limited to CD27, CD137, 2B4, TIGIT, CD155, ICOS, HVEM, CD40L, LIGHT, TIM-1, OX40, DNAM-1, PD-L1, PD1, PD-L2, CTLA-4, CD8, CD40, CEACAM1, CD48, CD70, A2AR, CD39, CD73, B7-H3, B7-H4, BTLA, IDO1, IDO2, TDO, KIR, LAG-3, TIM-3, or VISTA.

[0150] The targeting and/or retention antigen can be a cell surface molecule such as a protein, lipid or polysaccharide. In some embodiments, a targeting and/or retention antigen is a on a tumor cell, virally infected cell, bacterially infected cell, damaged red blood cell, arterial plaque cell, inflamed or fibrotic tissue cell. The targeting and/or retention antigen can comprise an immune response modulator. Examples of immune response modulator include but are not limited to granulocyte-macrophage colony stimulating factor (GM-CSF), macrophage colony stimulating factor (M-CSF), granulocyte colony stimulating factor (G-CSF), interleukin 2 (IL-2), interleukin 3 (IL-3), interleukin 12 (IL-12), interleukin 15 (IL-15), B7-1 (CD80), B7-2 (CD86), GITRL, CD3, or GITR.

[0151] The targeting and/or retention antigen can be a cytokine receptor. Examples, of cytokine receptors include but are not limited to Type I cytokine receptors, such as GM-CSF receptor, G-CSF receptor, Type I IL receptors, Epo receptor, LIF receptor, CNTF receptor, TPO receptor; Type II Cytokine receptors, such as IFN-alpha receptor (IFNAR1, IFNAR2), IFB-beta receptor, IFN-gamma receptor (IFNGR1, IFNGR2), Type II IL receptors; chemokine receptors, such as CC chemokine receptors, CXC chemokine receptors, CX3C chemokine receptors, XC chemokine receptors; tumor necrosis receptor superfamily receptors, such as TNFRSF5/CD40, TNFRSF8/CD30, TNFRSF7/CD27, TNFRSF1A/TNFR1/CD120a, TNFRSF1B/TNFR2/CD120b; TGF-beta receptors, such as TGF-beta receptor 1, TGF-beta receptor 2; Ig super family receptors, such as IL-1 receptors, CSF-1R, PDGFR (PDGFRA, PDGFRB), SCFR.

### Linkers

[0152] As stated above, the pharmaceutical compositions comprise one or more linker sequences. A linker sequence serves to provide flexibility between polypeptides, such that, for example, the blocking moiety is capable of inhibiting the activity of the cytokine polypeptide. The linker sequence can be located between any or all of the cytokine polypeptide, the serum half-life extension element, and/or the blocking moiety. As described herein at least one of the linkers is protease cleavable, and contains a (one or more) cleavage site for a (one or more) desired protease. Preferably, the desired protease is enriched or selectively expressed at the desired site of cytokine activity (e.g., the tumor microenvironment). Thus, the fusion protein is preferentially or selectively cleaved at the site of desired cytokine activity.

[0153] Suitable linkers can be of different lengths, such as from 1 amino acid (e.g., Gly) to 20 amino acids, from 2 amino acids to 15 amino acids, from 3 amino acids to 12 amino acids, including 4 amino acids to 10 amino acids, amino acids to 9 amino acids, 6 amino acids to 8 amino acids, or 7 amino acids to 8 amino acids, and may be 1, 2, 3, 4, 5, 6, 7, 8, 9, 10, 11, 12, 13, 14, 15, 16, 17, 18, 19, 20, 21, 22, 23, 24, 25, 26, 27, 28, 29, 30, 31, 32, 33, 34, 35, 36, 37, 38, 39, 40, 41, 42, 43, 44, 45, 46, 47, 48, 49, 50, 51, 52, 53, 54, 55, 56, 57, 58, 59, or 60 amino acids.

[0154] The orientation of the components of the pharmaceutical composition, are largely a matter of design choice and it is recognized that multiple orientations are possible and all are intended to be encompassed by this disclosure. For example, a blocking moiety can be located C-terminally or N-terminally to a cytokine polypeptide.

[0155] Proteases known to be associated with diseased cells or tissues include but are not limited to serine proteases, cysteine proteases, aspartate proteases, threonine proteases, glutamic acid proteases, metalloproteases, asparagine peptide lyases, serum proteases, cathepsins, Cathepsin B, Cathepsin C, Cathepsin D, Cathepsin E, Cathepsin K, Cathepsin L, kallikreins, hKl, hK10, hK15, plasmin, collagenase, Type IV collagenase, stromelysin, Factor Xa, chymotrypsin-like protease, trypsin-like protease, elastase-like protease, subtilisin-like protease, actinidain, bromelain, calpain, caspases, caspase-3, Mirl-CP, papain, HIV-1 protease, HSV protease, CMV protease, chymosin, refill, pepsin, matriptase, legumain, plasmepsin, nepenthesin, metalloexopeptidases, metalloendopeptidases, matrix metalloproteases (MMP), MMP1, MMP2, MMP3, MMP8, MMP9, MMP13, MMP11, MMP14, urokinase plasminogen activator (uPA), enterokinase, prostate-specific antigen (PSA, hK3), interleukin-1β converting enzyme, thrombin, FAP (FAP-a), dipeptidyl peptidase, meprins, granzymes and dipeptidyl peptidase IV (DPPIV/CD26). Proteases capable of cleaving amino acid sequences encoded by the chimeric nucleic acid sequences provided herein can, for example, be selected from the group consisting of a prostate specific antigen (PSA), a matrix metalloproteinase (MMP), an A Disintigrin and a Metalloproteinase (ADAM), a plasminogen activator, a cathepsin, a caspase, a tumor cell surface protease, and an elastase. The MMP can, for example, be matrix metalloproteinase 2 (MMP2) or matrix metalloproteinase 9 (MMP9).

[0156] Proteases useful in the methods disclosed herein are presented in Table 1, and exemplary proteases and their cleavage site are presented in Table 1a:

TABLE 1
Proteases relevant to inflammation and cancer

| | | |
|---|---|---|
| Protease | Specificity | Other aspects |

Secreted by killer T cells:

| | | |
|---|---|---|
| Granzyme B (grB) | Cleaves after Asp | Type of serine protease; strongly |
| | residues (asp-ase) | implicated in inducing perforin-dependent |
| | | target cell apoptosis |
| Granzyme A (grA) | trypsin-like, cleaves after | Type of serine protease; |
| | basic residues | |
| Granzyme H (grH) | Unknown substrate | Type of serine protease; |
| | specificity | Other granzymes are also secreted by |
| | | killer T cells, but not all are present in |
| | | humans |
| Caspase-8 | Cleaves after Asp | Type of cysteine protease; plays essential |
| | residues | role in TCR-induced cellular expansion- |
| | | exact molecular role unclear |
| Mucosa-associated | Cleaves after arginine | Type of cysteine protease; likely acts both |
| lymphoid tissue | residues | as a scaffold and proteolytically active |
| (MALT1) | | enzyme in the CBM-dependent signaling |
| | | pathway |
| Tryptase | Targets: angiotensin I, | Type of mast cell-specific serine protease; |
| | fibrinogen, prourokinase, | trypsin-like; resistant to inhibition by |
| | TGFβ; preferentially | macromolecular protease inhibitors |
| | cleaves proteins after | expressed in mammals due to their |
| | lysine or arginine | tetrameric structure, with all sites facing |
| | residues | narrow central pore; also associated with |
| | | inflammation |

Associated with inflammation:

| | | |
|---|---|---|
| Thrombin | Targets: FGF-2, | Type of serine protease; modulates |
| | HB-EGF, Osteo-pontin, | activity of vascular growth factors, |
| | PDGF, VEGF | chemokines and extracellular proteins; |
| | | strengthens VEGF-induced proliferation; |
| | | induces cell migration; angiogenic factor; |
| | | regulates hemostasis |
| Chymase | Exhibit chymotrypsin- | Type of mast cell-specific serine protease |
| | like specificity, cleaving | |
| | proteins after aromatic | |
| | amino acid residues | |
| Carboxypeptidase A | Cleaves amino acid | Type of zinc-dependent metalloproteinase |
| (MC-CPA) | residues from C-terminal | |
| | end of peptides and | |
| | proteins | |
| Kallikreins | Targets: high molecular | Type of serine protease; modulate |
| | weight | relaxation response; contribute to |
| | kininogen, pro-urokinase | inflammatory response; fibrin degradation |
| Elastase | Targets: E-cadherin, GM- | Type of neutrophil serine protease; |
| | CSF, IL-1, IL-2, IL-6, | degrades ECM components; regulates |
| | IL8, p38^{MAPK}, TNFα, VE- | inflammatory response; activates pro- |
| | cadherin | apoptotic signaling |
| Cathepsin G | Targets: EGF, ENA-78, | Type of serine protease; degrades ECM |
| | IL-8, MCP-1, MMP-2, | components; chemo-attractant of |
| | MT1-MMP, | leukocytes; regulates inflammatory |
| | PAI-1, RANTES, TGFβ, | response; promotes apoptosis |
| | TNFα | |
| PR-3 | Targets: ENA-78, IL-8, | Type of serine protease; promotes |
| | IL-18, JNK, p38^{MAPK}, | inflammatory response; activates pro- |
| | TNFα | apoptotic signaling |
| Granzyme M (grM) | Cleaves after Met and | Type of serine protease; only expressed in |
| | other long, unbranched | NK cells |
| | hydrophobic residues | |
| Calpains | Cleave between Arg and | Family of cysteine proteases; calcium- |
| | Gly | dependent; activation is involved in the |
| | | process of numerous inflammation- |
| | | associated diseases |

TABLE 1a
Exemplary Proteases and Protease Recognition
Sequences

| | Cleavage | SEQ |
|---|---|---|
| | Domain | ID |
| Protease | Sequence | NO: |
| MMP7 | KRALGLPG | 3 |
| MMP7 | (DE)₈RPLALWRS(DR)₈ | 4 |
| MMP9 | PR(S/T)(L/I)(S/T) | 5 |
| MMP9 | LEATA | 6 |
| MMP11 | GGAANLVRGG | 7 |
| MMP14 | SGRIGFLRTA | 8 |
| MMP | PLGLAG | 9 |
| MMP | PLGLAX | 10 |
| MMP | PLGC(me)AG | 11 |
| MMP | ESPAYYTA | 12 |
| MMP | RLQLKL | 13 |
| MMP | RLQLKAC | 14 |
| MMP2, MMP9, MMP14 | EP(Cit)G(Hof)YL | 15 |
| Urokinase plasminogen | SGRSA | 16 |
| activator (uPA) | | |
| Urokinase plasminogen | DAFK | 17 |
| activator (uPA) | | |
| Urokinase plasminogen | GGGRR | 18 |
| activator (uPA) | | |
| Lysosomal Enzyme | GFLG | 19 |
| Lysosomal Enzyme | ALAL | 20 |
| Lysosomal Enzyme | FK | 21 |
| Cathepsin B | NLL | 22 |
| Cathepsin D | PIC(Et)FF | 23 |
| Cathepsin K | GGPRGLPG | 24 |
| Prostate Specific Antigen | HSSKLQ | 25 |
| Prostate Specific Antigen | HSSKLQL | 26 |
| Prostate Specific Antigen | HSSKLQEDA | 27 |
| Herpes Simplex Virus | LVLASSSFGY | 28 |
| Protease | | |
| HIV Protease | GVSQNYPIVG | 29 |
| CMV Protease | GVVQASCRLA | 30 |
| Thrombin | F(Pip)RS | 31 |
| Thrombin | DPRSFL | 32 |
| Thrombin | PPRSFL | 33 |
| Caspase-3 | DEVD | 34 |
| Caspase-3 | DEVDP | 35 |
| Caspase-3 | KGSGDVEG | 36 |
| Interleukin 1β converting | GWEHDG | 37 |
| enzyme | | |
| Enterokinase | EDDDDKA | 38 |
| FAP | KQEQNPGST | 39 |
| Kallikrein 2 | GKAFRR | 40 |
| Plasmin | DAFK | 41 |
| Plasmin | DVLK | 42 |
| Plasmin | DAFK | 43 |
| TOP | ALLLALL | 44 |

[0157] Provided herein are pharmaceutical compositions comprising polypeptide sequences. As with all peptides, polypeptides, and proteins, including fragments thereof, it is understood that additional modifications in the amino acid sequence of the chimeric polypeptides (amino acid sequence variants) can occur that do not alter the nature or function of the peptides, polypeptides, or proteins. Such modifications include conservative amino acid substitutions and are discussed in greater detail below.

[0158] The compositions provided herein have a desired function. The compositions are comprised of at least a cytokine polypeptide, such as IL-2, IL-7, IL-12, IL-15, IL-18, IL-21, IFNa, or IFNγ, or a chemokine, such as CXCL10, CCL19, CCL20, CCL21, a blocking moiety, e.g. a steric blocking polypeptide, and an optional serum half-life extension element, and an optional targeting polypeptide, with one or more linkers connecting each polypeptide in the composition. The first polypeptide, e.g., an IL-2 mutein, is provided to be an active agent. The blocking moiety is provided to block the activity of the interleukin. The linker polypeptide, e.g., a protease cleavable polypeptide, is provided to be cleaved by a protease that is specifically expressed at the intended target of the active agent. Optionally, the blocking moiety blocks the activity of the first polypeptide by binding the interleukin polypeptide. In some embodiments, the blocking moiety, e.g. a steric blocking peptide, is linked to the interleukin via a protease-cleavable linker which is cleaved at the site of action (e.g. by inflammation-specific or tumor-specific proteases) releasing the cytokine full activity at the desired site.

[0159] The protease cleavage site may be a naturally occurring protease cleavage site or an artificially engineered protease cleavage site. The artificially engineered protease cleavage site can be cleaved by more than one protease specific to the desired environment in which cleavage will occur, e.g. a tumor. The protease cleavage site may be cleavable by at least one protease, at least two proteases, at least three proteases, or at least four proteases.

[0160] In some embodiments, the linker comprises glycine-glycine, a sortase-recognition motif, or a sortase-recognition motif and a peptide sequence (Gly₄Ser)ₙ (SEQ ID NO.: 443) or (Gly₃Ser)ₙ (SEQ ID NO.: 444), wherein n is 1, 2, 3, 4 or 5. In one embodiment, the sortase-recognition motif comprises a peptide sequence LPXTG (SEQ ID NO.: 442), where X is any amino acid. In one embodiment, the covalent linkage is between a reactive lysine residue attached to the C-terminal of the cytokine polypeptide and a reactive aspartic acid attached to the N-terminal of the blocking or other moiety. In one embodiment, the covalent linkage is between a reactive aspartic acid residue attached to the N-terminal of the cytokine polypeptide and a reactive lysine residue attached to the C-terminal of the blocking or other moiety.

### Cleavage and Inducibility

[0161] As described herein, the activity of the cytokine polypeptide the context of the fusion protein is attenuated, and protease cleavage at the desired site of activity, such as in a tumor microenvironment, releases a form of the cytokine from the fusion protein that is much more active as a cytokine receptor agonist than the fusion protein. For example, the cytokine-receptor activating (agonist) activity of the fusion polypeptide can be at least about 10×, at least about 50×, at least about 100×, at least about 250×, at least about 500×, or at least about 1000× less than the cytokine receptor activating activity of the cytokine polypeptide as a separate molecular entity. The cytokine polypeptide that is part of the fusion protein exists as a separate molecular entity when it contains an amino acid that is substantially identical to the cytokine polypeptide and does not substantially include additional amino acids and is not associated (by covalent or non-covalent bonds) with other molecules. If necessary, a cytokine polypeptide as a separate molecular entity may include some additional amino acid sequences, such as a tag or short sequence to aid in expression and/or purification.

[0162] In other examples, the cytokine-receptor activating (agonist) activity of the fusion polypeptide is at least about 10×, at least about 50×, at least about 100×, at least about 250×, at least about 500×, or about 1000× less than the cytokine receptor activating activity of the polypeptide that contains the cytokine polypeptide that is produced by cleavage of the protease cleavable linker in the fusion protein. In other words, the cytokine receptor activating (agonist) activity of the polypeptide that contains the cytokine polypeptide that is produced by cleavage of the protease cleavable linker in the fusion protein is at least about 10×, at least about 50×, at least about 100×, at least about 250×, at least about 500×, or at least about 1000× greater than the cytokine receptor activating activity of the fusion protein.

### Polypeptide Substitutions

[0163] The polypeptides described herein can include components (e.g., the cytokine, the blocking moiety) that have the same amino acid sequence of the corresponding naturally occurring protein (e.g., IL-2, IL-15, HSA) or can have an amino acid sequence that differs from the naturally occurring protein so long as the desired function is maintained. It is understood that one way to define any known modifications and derivatives or those that might arise, of the disclosed proteins and nucleic acids that encode them is through defining the sequence variants in terms of identity to specific known reference sequences. Specifically disclosed are polypeptides and nucleic acids which have at least, 70, 71, 72, 73, 74, 75, 76, 77, 78, 79, 80, 81, 82, 83, 84, 85, 86, 87, 88, 89, 90, 91, 92, 93, 94, 95, 96, 97, 98, 99 percent identity to the chimeric polypeptides provided herein. For example, provided are polypeptides or nucleic acids that have at least, 70, 71, 72, 73, 74, 75, 76, 77, 78, 79, 80, 81, 82, 83, 84, 85, 86, 87, 88, 89, 90, 91, 92, 93, 94, 95, 96, 97, 98, 99 percent identity to the sequence of any of the nucleic acids or polypeptides described herein. Those of skill in the art readily understand how to determine the identity of two polypeptides or two nucleic acids. For example, the identity can be calculated after aligning the two sequences so that the identity is at its highest level.

[0164] Another way of calculating identity can be performed by published algorithms. Optimal alignment of sequences for comparison may be conducted by the local identity algorithm of Smith and Waterman Adv. Appl. Math. 2:482 (1981), by the identity alignment algorithm of Needleman and Wunsch, J. Mol. Biol. 48:443 (1970), by the search for similarity method of Pearson and Lipman, Proc. Natl. Acad. Sci. USA 85:2444 (1988), by computerized implementations of these algorithms (GAP, BESTFIT, FASTA, and TFASTA in the Wisconsin Genetics Software Package, Genetics Computer Group, 575 Science Dr., Madison, Wis.), or by inspection.

[0165] The same types of identity can be obtained for nucleic acids by, for example, the algorithms disclosed in Zuker, Science 244:48-52 (1989); Jaeger et al., Proc. Natl. Acad. Sci. USA 86:7706-7710 (1989); Jaeger et al., Methods Enzymol. 183:281-306 (1989), which are herein incorporated by reference for at least material related to nucleic acid alignment. It is understood that any of the methods typically can be used and that in certain instances the results of these various methods may differ, but the skilled artisan understands if identity is found with at least one of these methods, the sequences would be said to have the stated identity, and be disclosed herein.

[0166] Protein modifications include amino acid sequence modifications. Modifications in amino acid sequence may arise naturally as allelic variations (e.g., due to genetic polymorphism), may arise due to environmental influence (e.g., by exposure to ultraviolet light), or may be produced by human intervention (e.g., by mutagenesis of cloned DNA sequences), such as induced point, deletion, insertion and substitution mutants. These modifications can result in changes in the amino acid sequence, provide silent mutations, modify a restriction site, or provide other specific mutations. Amino acid sequence modifications typically fall into one or more of three classes: substitutional, insertional or deletional modifications. Insertions include amino and/or carboxyl terminal fusions as well as intrasequence insertions of single or multiple amino acid residues. Insertions ordinarily will be smaller insertions than those of amino or carboxyl terminal fusions, for example, on the order of one to four residues. Deletions are characterized by the removal of one or more amino acid residues from the protein sequence. Typically, no more than about from 2 to 6 residues are deleted at any one site within the protein molecule. Amino acid substitutions are typically of single residues, but can occur at a number of different locations at once; insertions usually will be on the order of about from 1 to 10 amino acid residues; and deletions will range about from 1 to 30 residues. Deletions or insertions preferably are made in adjacent pairs, i.e. a deletion of 2 residues or insertion of 2 residues. Substitutions, deletions, insertions or any combination thereof may be combined to arrive at a final construct. The mutations must not place the sequence out of reading frame and preferably will not create complementary regions that could produce secondary mRNA structure. Substitutional modifications are those in which at least one residue has been removed and a different residue inserted in its place. Such substitutions generally are made in accordance with the following Table 2 and are referred to as conservative substitutions.

TABLE 2
Exemplary amino acid substitutions

| Amino Acid | Exemplary Substitutions |
|---|---|
| Ala | Ser, Gly, Cys |
| Arg | Lys, Gln, Met, Ile |
| Asn | Gln, His, Glu, Asp |
| Asp | Glu, Asn, Gln |
| Cys | Ser, Met, Thr |
| Gln | Asn, Lys, Glu, Asp |
| Glu | Asp, Asn, Gln |
| Gly | Pro, Ala |
| His | Asn, Gln |
| Ile | Leu, Val, Met |
| Leu | Ile, Val, Met |
| Lys | Arg, Gln, Met, Ile |
| Met | Leu, Ile, Val |
| Phe | Met, Leu, Tyr, Trp, His |
| Ser | Thr, Met, Cys |
| Thr | Ser, Met, Val |
| Trp | Tyr, Phe |
| Tyr | Trp, Phe, His |
| Val | Ile, Leu, Met |

[0167] Modifications, including the specific amino acid substitutions, are made by known methods. For example, modifications are made by site specific mutagenesis of nucleotides in the DNA encoding the polypeptide, thereby producing DNA encoding the modification, and thereafter expressing the DNA in recombinant cell culture. Techniques for making substitution mutations at predetermined sites in DNA having a known sequence are well known, for example M13 primer mutagenesis and PCR mutagenesis.

[0168] Modifications can be selected to optimize binding For example, affinity maturation techniques can be used to alter binding of the scFv by introducing random mutations inside the complementarity determining regions (CDRs). Such random mutations can be introduced using a variety of techniques, including radiation, chemical mutagens or error-prone PCR. Multiple rounds of mutation and selection can be performed using, for example, phage display.

[0169] The disclosure also relates to nucleic acids that encode the chimeric polypeptides described herein, and to the use of such nucleic acids to produce the chimeric polypeptides and for therapeutic purposes. For example, the invention includes DNA and RNA molecules (e.g., mRNA, self-replicating RNA) that encode a chimeric polypeptide and to the therapeutic use of such DNA and RNA molecules.

### Exemplary Compositions

[0170] Exemplary fusion proteins of the invention combine the above described elements in a variety of orientations. The orientations described in this section are meant as examples and are not to be considered limiting.

[0171] In some embodiments, the fusion protein comprises a cytokine, a blocking moiety and a half-life extension element. In some embodiments, the cytokine is positioned between the half-life extension element and the blocking moiety. In some embodiments, the cytokine is N-terminal to the blocking moiety and the half-life extension element. In some such embodiments, the cytokine is proximal to the blocking moiety; in some such embodiments, the cytokine is proximal to the half-life extension element. At least one protease-cleavable linker must be included in all embodiments, such that the cytokine may be active upon cleavage. In some embodiments, the cytokine is C-terminal to the blocking moiety and the half-life extension element. Additional elements may be attached to one another by a cleavable linker, a non-cleavable linker, or by direct fusion.

[0172] In some embodiments, the blocking domains used are capable of extending half-life, and the cytokine is positioned between two such blocking domains. In some embodiments, the cytokine is positioned between two blocking domains, one of which is capable of extending half-life.

[0173] In some embodiments, two cytokines are included in the same construct. In some embodiments, the cytokines are connected to two blocking domains each (three in total in one molecule), with a blocking domain between the two cytokine domains. In some embodiments, one or more additional half-life extension domains may be included to optimize pharmacokinetic properties. In some cases, it is beneficial to include two of the same cytokine to facilitate dimerization. An example of a cytokine that works as a dimer is IFN□.

[0174] In some embodiments, three cytokines are included in the same construct. In some embodiments, the third cytokine may function to block the other two in place of a blocking domain between the two cytokines.

[0175] Preferred half-life extension elements for use in the fusion proteins are human serum albumin (HSA), an antibody or antibody fragment (e.g., scFV, dAb) which binds serum albumin, a human or humanized IgG, or a fragment of any of the foregoing. In some preferred embodiments, the blocking moiety is human serum albumin (HSA), or an antibody or antibody fragment which binds serum albumin, an antibody which binds the cytokine and prevents activation of binding or activation of the cytokine receptor, another cytokine, or a fragment of any of the foregoing. In preferred embodiments comprising an additional targeting domain, the targeting domain is an antibody which binds a cell surface protein which is enriched on the surface of cancer cells, such as EpCAM, FOLR1, and Fibronectin.

### Methods of Treatment and Pharmaceutical Compositions

[0176] Further provided are methods of treating a subject with or at risk of developing an of a disease or disorder, such as proliferative disease, a tumorous disease, an inflammatory disease, an immunological disorder, an autoimmune disease, an infectious disease, a viral disease, an allergic reaction, a parasitic reaction, or graft-versus-host disease. The methods administering to a subject in need thereof an effective amount of a fusion protein as disclosed herein that is typically administered as a pharmaceutical composition. In some embodiments, the method further comprises selecting a subject with or at risk of developing such a disease or disorder. The pharmaceutical composition preferably comprises a blocked cytokine, fragment or mutein thereof that is activated at a site of inflammation or a tumor. In one embodiment, the chimeric polypeptide comprises a cytokine polypeptide, fragment or mutein thereof and a serum half-life extension element. In another embodiment, the chimeric polypeptide comprises a cytokine polypeptide, fragment or mutein thereof and a blocking moiety, e.g. a steric blocking polypeptide, wherein the steric blocking polypeptide is capable of sterically blocking the activity of the cytokine polypeptide, fragment or mutein thereof. In another embodiment, the chimeric polypeptide comprises a cytokine polypeptide, fragment or mutein thereof, a blocking moiety, and a serum half-life extension element.

[0177] Inflammation is part of the complex biological response of body tissues to harmful stimuli, such as pathogens, damaged cells, or irritants, and is a protective response involving immune cells, blood vessels, and molecular mediators. The function of inflammation is to eliminate the initial cause of cell injury, clear out necrotic cells and tissues damaged from the original insult and the inflammatory process, and to initiate tissue repair. Inflammation can occur from infection, as a symptom or a disease, e.g., cancer, atherosclerosis, allergies, myopathies, HIV, obesity, or an autoimmune disease. An autoimmune disease is a chronic condition arising from an abnormal immune response to a self-antigen. Autoimmune diseases that may be treated with the polypeptides disclosed herein include but are not limited to lupus, celiac disease, diabetes mellitus type 1, Graves disease, inflammatory bowel disease, multiple sclerosis, psoriasis, rheumatoid arthritis, and systemic lupus erythematosus.

[0178] The pharmaceutical composition can comprise one or more protease-cleavable linker sequences. The linker sequence serves to provide flexibility between polypeptides, such that each polypeptide is capable of inhibiting the activity of the first polypeptide. The linker sequence can be located between any or all of the cytokine polypeptide, fragment or mutein thereof, the blocking moiety, and serum half-life extension element. Optionally, the composition comprises, two, three, four, or five linker sequences. The linker sequence, two, three, or four linker sequences can be the same or different linker sequences. In one embodiment, the linker sequence comprises GGGGS (SEQ ID NO.: 449), GSGSGS (SEQ ID NO.: 450), or G(SGGG)₂SGGT (SEQ ID NO.: 451). In another embodiment, the linker comprises a protease-cleavable sequence selected from group consisting of HSSKLQ (SEQ ID NO.: 25), GPLGVRG (SEQ ID NO.: 445), IPVSLRSG (SEQ ID NO.: 446), VPLSLYSG (SEQ ID NO.: 447, and SGESPAYYTA (SEQ ID NO.: 448).

[0179] In some embodiments, the linker is cleaved by a protease selected from the group consisting of a kallikrein, thrombin, chymase, carboxypeptidase A, cathepsin G, an elastase, PR-3, granzyme M, a calpain, a matrix metalloproteinase (MMP), a plasminogen activator, a cathepsin, a caspase, a tryptase, or a tumor cell surface protease.

[0180] Suitable linkers can be of different lengths, such as from 1 amino acid (e.g., Gly) to 20 amino acids, from 2 amino acids to 15 amino acids, from 3 amino acids to 12 amino acids, including 4 amino acids to 10 amino acids, amino acids to 9 amino acids, 6 amino acids to 8 amino acids, or 7 amino acids to 8 amino acids, and may be 1, 2, 3, 4, 5, 6, 7, 8, 9, 10, 11, 12, 13, 14, 15, 16, 17, 18, 19, 20, 21, 22, 23, 24, 25, 26, 27, 28, 29, 30, 31, 32, 33, 34, 35, 36, 37, 38, 39, 40, 41, 42, 43, 44, 45, 46, 47, 48, 49, 50, 51, 52, 53, 54, 55, 56, 57, 58, 59, or 60 amino acids.

[0181] Further provided are methods of treating a subject with or at risk of developing cancer. The methods comprise administering to the subject in need thereof an effective amount of a chimeric polypeptide (a fusion protein) as disclosed herein that is typically administered as a pharmaceutical composition. In some embodiments, the method further comprises selecting a subject with or at risk of developing cancer. The pharmaceutical composition preferably comprises a blocked cytokine, fragment or mutein thereof that is activated at a tumor site. Preferably, the tumor is a solid tumor. The cancer may be, but not limited to, a colon cancer, a lung cancer, a melanoma, a sarcoma, a renal cell carcinoma, and a breast cancer.

[0182] The method can further involve the administration of one or more additional agents to treat cancer, such as chemotherapeutic agents (e.g., Adriamycin, Cerubidine, Bleomycin, Alkeran, Velban, Oncovin, Fluorouracil, Thiotepa, Methotrexate, Bisantrene, Noantrone, Thiguanine, Cytaribine, Procarabizine), immuno-oncology agents (e.g., anti-PD-L1, anti-CTLA4, anti-PD-1, anti-CD47, anti-GD2), cellular therapies (e.g, CAR-T, T-cell therapy), oncolytic viruses and the like.

[0183] Provided herein are pharmaceutical formulations or compositions containing the chimeric polypeptides and a pharmaceutically acceptable carrier. The herein provided compositions are suitable for administration in vitro or in vivo. By pharmaceutically acceptable carrier is meant a material that is not biologically or otherwise undesirable, i.e., the material is administered to a subject without causing undesirable biological effects or interacting in a deleterious manner with the other components of the pharmaceutical formulation or composition in which it is contained. The carrier is selected to minimize degradation of the active ingredient and to minimize adverse side effects in the subject.

[0184] Suitable carriers and their formulations are described in Remington: The Science and Practice of Pharmacy, 21^{st} Edition, David B. Troy, ed., Lippicott Williams & Wilkins (2005). Typically, an appropriate amount of a pharmaceutically-acceptable salt is used in the formulation to render the formulation isotonic, although the formulate can be hypertonic or hypotonic if desired. Examples of the pharmaceutically-acceptable carriers include, but are not limited to, sterile water, saline, buffered solutions like Ringer's solution, and dextrose solution. The pH of the solution is generally about 5 to about 8 or from about 7 to 7.5. Other carriers include sustained release preparations such as semipermeable matrices of solid hydrophobic polymers containing the immunogenic polypeptides. Matrices are in the form of shaped articles, e.g., films, liposomes, or microparticles. Certain carriers may be more preferable depending upon, for instance, the route of administration and concentration of composition being administered. Carriers are those suitable for administration of the chimeric polypeptides or nucleic acid sequences encoding the chimeric polypeptides to humans or other subjects.

[0185] The pharmaceutical formulations or compositions are administered in a number of ways depending on whether local or systemic treatment is desired and on the area to be treated. The compositions are administered via any of several routes of administration, including topically, orally, parenterally, intravenously, intra-articularly, intraperitoneally, intramuscularly, subcutaneously, intracavity, transdermally, intrahepatically, intracranially, nebulization/inhalation, or by installation via bronchoscopy. In some embodiments, the compositions are administered locally (non-systemically), including intratumorally, intra-articularly, intrathecally, etc.

[0186] Preparations for parenteral administration include sterile aqueous or non-aqueous solutions, suspensions, and emulsions. Examples of non-aqueous solvents are propylene glycol, polyethylene glycol, vegetable oils such as olive oil, and injectable organic esters such as ethyl oleate. Aqueous carriers include water, alcoholic/aqueous solutions, emulsions or suspensions, including saline and buffered media. Parenteral vehicles include sodium chloride solution, Ringer's dextrose, dextrose and sodium chloride, lactated Ringer's, or fixed oils. Intravenous vehicles include fluid and nutrient replenishers, electrolyte replenishers (such as those based on Ringer's dextrose), and the like. Preservatives and other additives are optionally present such as, for example, antimicrobials, anti-oxidants, chelating agents, and inert gases and the like.

[0187] Formulations for topical administration include ointments, lotions, creams, gels, drops, suppositories, sprays, liquids, and powders. Conventional pharmaceutical carriers, aqueous, powder, or oily bases, thickeners and the like are optionally necessary or desirable.

[0188] Compositions for oral administration include powders or granules, suspension or solutions in water or non-aqueous media, capsules, sachets, or tables. Thickeners, flavorings, diluents, emulsifiers, dispersing aids or binders are optionally desirable.

[0189] Optionally, the chimeric polypeptides or nucleic acid sequences encoding the chimeric polypeptides are administered by a vector. There are a number of compositions and methods which can be used to deliver the nucleic acid molecules and/or polypeptides to cells, either in vitro or in vivo via, for example, expression vectors. These methods and compositions can largely be broken down into two classes: viral based delivery systems and non-viral based delivery systems. Such methods are well known in the art and readily adaptable for use with the compositions and methods described herein. Such compositions and methods can be used to transfect or transduce cells in vitro or in vivo, for example, to produce cell lines that express and preferably secrete the encoded chimeric polypeptide or to therapeutically deliver nucleic acids to a subject. The components of the chimeric nucleic acids disclosed herein typically are operably linked in frame to encode a fusion protein.

[0190] As used herein, plasmid or viral vectors are agents that transport the disclosed nucleic acids into the cell without degradation and include a promoter yielding expression of the nucleic acid molecule and/or polypeptide in the cells into which it is delivered. Viral vectors are, for example, Adenovirus, Adeno-associated virus, herpes virus, Vaccinia virus, Polio virus, Sindbis, and other RNA viruses, including these viruses with the HIV backbone. Also preferred are any viral families which share the properties of these viruses which make them suitable for use as vectors. Retroviral vectors, in general are described by Coffin et al., Retroviruses, Cold Spring Harbor Laboratory Press (1997), which is incorporated by reference herein for the vectors and methods of making them. The construction of replication-defective adenoviruses has been described (Berkner et al., J. Virol. 61:1213-20 (1987); Massie et al., Mol. Cell. Biol. 6:2872-83 (1986); Haj-Ahmad et al., J. Virol. 57:267-74 (1986); Davidson et al., J. Virol. 61:1226-39 (1987); Zhang et al., BioTechniques 15:868-72 (1993)). The benefit and the use of these viruses as vectors is that they are limited in the extent to which they can spread to other cell types, since they can replicate within an initial infected cell, but are unable to form new infectious viral particles. Recombinant adenoviruses have been shown to achieve high efficiency after direct, in vivo delivery to airway epithelium, hepatocytes, vascular endothelium, CNS parenchyma, and a number of other tissue sites. Other useful systems include, for example, replicating and host-restricted non-replicating vaccinia virus vectors.

[0191] The provided polypeptides and/or nucleic acid molecules can be delivered via virus like particles. Virus like particles (VLPs) consist of viral protein(s) derived from the structural proteins of a virus. Methods for making and using virus like particles are described in, for example, Garcea and Gissmann, Current Opinion in Biotechnology 15:513-7 (2004).

[0192] The provided polypeptides can be delivered by subviral dense bodies (DBs). DBs transport proteins into target cells by membrane fusion. Methods for making and using DBs are described in, for example, Pepperl-Klindworth et al., Gene Therapy 10:278-84 (2003).

[0193] The provided polypeptides can be delivered by tegument aggregates. Methods for making and using tegument aggregates are described in International Publication No. WO 2006/110728.

[0194] Non-viral based delivery methods, can include expression vectors comprising nucleic acid molecules and nucleic acid sequences encoding polypeptides, wherein the nucleic acids are operably linked to an expression control sequence. Suitable vector backbones include, for example, those routinely used in the art such as plasmids, artificial chromosomes, BACs, YACs, or PACs. Numerous vectors and expression systems are commercially available from such corporations as Novagen (Madison, Wis.), Clonetech (Pal Alto, Calif.), Stratagene (La Jolla, Calif.), and Invitrogen/Life Technologies (Carlsbad, Calif.). Vectors typically contain one or more regulatory regions. Regulatory regions include, without limitation, promoter sequences, enhancer sequences, response elements, protein recognition sites, inducible elements, protein binding sequences, 5′ and 3′ untranslated regions (UTRs), transcriptional start sites, termination sequences, polyadenylation sequences, and introns. Such vectors can also be used to make the chimeric polypeptides by expression is a suitable host cell, such as CHO cells.

[0195] Preferred promoters controlling transcription from vectors in mammalian host cells may be obtained from various sources, for example, the genomes of viruses such as polyoma, Simian Virus 40 (SV40), adenovirus, retroviruses, hepatitis B virus, and most preferably cytomegalovirus (CMV), or from heterologous mammalian promoters, e.g. β-actin promoter or EF1α promoter, or from hybrid or chimeric promoters (e.g., CMV promoter fused to the β-actin promoter). Of course, promoters from the host cell or related species are also useful herein.

[0196] Enhancer generally refers to a sequence of DNA that functions at no fixed distance from the transcription start site and can be either 5′ or 3′ to the transcription unit. Furthermore, enhancers can be within an intron as well as within the coding sequence itself. They are usually between 10 and 300 base pairs (bp) in length, and they function in cis Enhancers usually function to increase transcription from nearby promoters Enhancers can also contain response elements that mediate the regulation of transcription. While many enhancer sequences are known from mammalian genes (globin, elastase, albumin, fetoprotein, and insulin), typically one will use an enhancer from a eukaryotic cell virus for general expression. Preferred examples are the SV40 enhancer on the late side of the replication origin, the cytomegalovirus early promoter enhancer, the polyoma enhancer on the late side of the replication origin, and adenovirus enhancers.

[0197] The promoter and/or the enhancer can be inducible (e.g. chemically or physically regulated). A chemically regulated promoter and/or enhancer can, for example, be regulated by the presence of alcohol, tetracycline, a steroid, or a metal. A physically regulated promoter and/or enhancer can, for example, be regulated by environmental factors, such as temperature and light. Optionally, the promoter and/or enhancer region can act as a constitutive promoter and/or enhancer to maximize the expression of the region of the transcription unit to be transcribed. In certain vectors, the promoter and/or enhancer region can be active in a cell type specific manner. Optionally, in certain vectors, the promoter and/or enhancer region can be active in all eukaryotic cells, independent of cell type. Preferred promoters of this type are the CMV promoter, the SV40 promoter, the β-actin promoter, the EF1α promoter, and the retroviral long terminal repeat (LTR).

[0198] The vectors also can include, for example, origins of replication and/or markers. A marker gene can confer a selectable phenotype, e.g., antibiotic resistance, on a cell. The marker product is used to determine if the vector has been delivered to the cell and once delivered is being expressed. Examples of selectable markers for mammalian cells are dihydrofolate reductase (DHFR), thymidine kinase, neomycin, neomycin analog G418, hygromycin, puromycin, and blasticidin. When such selectable markers are successfully transferred into a mammalian host cell, the transformed mammalian host cell can survive if placed under selective pressure. Examples of other markers include, for example, the E. coli lacZ gene, green fluorescent protein (GFP), and luciferase. In addition, an expression vector can include a tag sequence designed to facilitate manipulation or detection (e.g., purification or localization) of the expressed polypeptide. Tag sequences, such as GFP, glutathione S-transferase (GST), polyhistidine, c-myc, hemagglutinin, or FLAG™ tag (Kodak; New Haven, Conn.) sequences typically are expressed as a fusion with the encoded polypeptide. Such tags can be inserted anywhere within the polypeptide including at either the carboxyl or amino terminus.

[0199] As used herein, the terms peptide, polypeptide, or protein are used broadly to mean two or more amino acids linked by a peptide bond. Protein, peptide, and polypeptide are also used herein interchangeably to refer to amino acid sequences. It should be recognized that the term polypeptide is not used herein to suggest a particular size or number of amino acids comprising the molecule and that a peptide of the invention can contain up to several amino acid residues or more. As used throughout, subject can be a vertebrate, more specifically a mammal (e.g. a human, horse, cat, dog, cow, pig, sheep, goat, mouse, rabbit, rat, and guinea pig), birds, reptiles, amphibians, fish, and any other animal. The term does not denote a particular age or sex. Thus, adult and newborn subjects, whether male or female, are intended to be covered. As used herein, patient or subject may be used interchangeably and can refer to a subject with a disease or disorder (e.g. cancer). The term patient or subject includes human and veterinary subjects.

[0200] A subject at risk of developing a disease or disorder can be genetically predisposed to the disease or disorder, e.g., have a family history or have a mutation in a gene that causes the disease or disorder, or show early signs or symptoms of the disease or disorder. A subject currently with a disease or disorder has one or more than one symptom of the disease or disorder and may have been diagnosed with the disease or disorder.

[0201] The methods and agents as described herein are useful for both prophylactic and therapeutic treatment. For prophylactic use, a therapeutically effective amount of the chimeric polypeptides or chimeric nucleic acid sequences encoding the chimeric polypeptides described herein are administered to a subject prior to onset (e.g., before obvious signs of cancer or inflammation) or during early onset (e.g., upon initial signs and symptoms of cancer or inflammation). Prophylactic administration can occur for several days to years prior to the manifestation of symptoms of cancer or inflammation. Prophylactic administration can be used, for example, in the preventative treatment of subjects diagnosed with a genetic predisposition to cancer. Therapeutic treatment involves administering to a subject a therapeutically effective amount of the chimeric polypeptides or nucleic acid sequences encoding the chimeric polypeptides described herein after diagnosis or development of cancer or inflammation (e.g., an autoimmune disease). Prophylactic use may also apply when a patient is undergoing a treatment, e.g., a chemotherapy, in which inflammation is expected.

[0202] According to the methods taught herein, the subject is administered an effective amount of the agent (e.g., a chimeric polypeptide). The terms effective amount and effective dosage are used interchangeably. The term effective amount is defined as any amount necessary to produce a desired physiologic response. Effective amounts and schedules for administering the agent may be determined empirically, and making such determinations is within the skill in the art. The dosage ranges for administration are those large enough to produce the desired effect in which one or more symptoms of the disease or disorder are affected (e.g., reduced or delayed). The dosage should not be so large as to cause substantial adverse side effects, such as unwanted cross-reactions, anaphylactic reactions, and the like. Generally, the dosage will vary with the age, condition, sex, type of disease, the extent of the disease or disorder, route of administration, or whether other drugs are included in the regimen, and can be determined by one of skill in the art. The dosage can be adjusted by the individual physician in the event of any contraindications. Dosages can vary and can be administered in one or more dose administrations daily, for one or several days. Guidance can be found in the literature for appropriate dosages for given classes of pharmaceutical products.

[0203] As used herein the terms treatment, treat, or treating refers to a method of reducing the effects of a disease or condition or symptom of the disease or condition. Thus, in the disclosed method, treatment can refer to a 10%, 20%, 30%, 40%, 50%, 60%, 70%, 80%, 90%, or 100% reduction in the severity of an established disease or condition or symptom of the disease or condition. For example, a method for treating a disease is considered to be a treatment if there is a 10% reduction in one or more symptoms of the disease in a subject as compared to a control. Thus, the reduction can be a 10%, 20%, 30%, 40%, 50%, 60%, 70%, 80%, 90%, 100%, or any percent reduction in between 10% and 100% as compared to native or control levels. It is understood that treatment does not necessarily refer to a cure or complete ablation of the disease, condition, or symptoms of the disease or condition.

[0204] As used herein, the terms prevent, preventing, and prevention of a disease or disorder refers to an action, for example, administration of the chimeric polypeptide or nucleic acid sequence encoding the chimeric polypeptide, that occurs before or at about the same time a subject begins to show one or more symptoms of the disease or disorder, which inhibits or delays onset or exacerbation of one or more symptoms of the disease or disorder. As used herein, references to decreasing, reducing, or inhibiting include a change of 10%, 20%, 30%, 40%, 50%, 60%, 70%, 80%, 90% or greater as compared to a control level. Such terms can include but do not necessarily include complete elimination.

[0205] IL-2 variants have been developed that are selective for IL2Rαβγ relative to IL2Rβγ (Shanafelt, A. B., et al., 2000, Nat Biotechno1.18:1197-202; Cassell, D. J., et. al., 2002, Curr Pharm Des., 8:2171-83). These variants have amino acid substitutions which reduce their affinity for IL2RB. Because IL-2 has undetectable affinity for IL2RG, these variants consequently have reduced affinity for the IL2Rβγ receptor complex and reduced ability to activate IL2Rβγ-expressing cells, but retain the ability to bind IL2RA and the ability to bind and activate the IL2Rαβγ receptor complex.

[0206] One of these variants, IL2/N88R (Bay 50-4798), was clinically tested as a low-toxicity version of IL-2 as an immune system stimulator, based on the hypothesis that IL2Rβγ-expressing NK cells are a major contributor to toxicity. Bay 50-4798 was shown to selectively stimulate the proliferation of activated T cells relative to NK cells, and was evaluated in phase I/II clinical trials in cancer patients (Margolin, K., et. al., 2007, Clin Cancer Res., 13:3312-9) and HIV patients (Davey, R. T., et. al., 2008, J Interferon Cytokine Res., 28:89-100). These clinical trials showed that Bay 50-4798 was considerably safer and more tolerable than aldesleukin, and also showed that it increased the levels of CD4+CD25+ T cells, a cell population enriched in Treg cells. Subsequent to these trials, research in the field more fully established the identity of Treg cells and demonstrated that Treg cells selectively express IL2Rαβγ (reviewed in Malek, T. R., et al., 2010, Immunity, 33:153-65).

[0207] In addition, mutants can be made that selectively alter the affinity for the CD25 chain relative to native 11-2.

[0208] IL-2 can be engineered to produce mutants that bind the IL-2R complex generally or the IL-2Rα subunit specifically with an affinity that differs from that of the corresponding wild-type IL-2 or of a presently available mutant (referred to as C125S, as the cysteine residue at position 125 is replaced with a serine residue).

[0209] Accordingly, the present invention features mutant interleukin-2 (IL-2*) polypeptides that include an amino acid sequence that is at least 80% identical to wild-type IL-2 (e.g., 85, 87, 90, 95, 97, 98, or 99% identical) and that bind, as compared to WT IL-2, with higher to the IL-2 trimeric receptor relative to the dimeric IL-2 receptor. Typically, the muteins will also bind an IL-2 receptor a subunit (IL-2Rα) with an affinity that is greater than the affinity with which wild type IL-2 binds the IL-2Rα. The amino acid sequence within mutant IL-2 polypeptides can vary from SEQ ID NO:1 (UniProtKB accession number P60568) by virtue of containing (or only containing) one or more amino acid substitutions, which may be considered conservative or non-conservative substitutions. Non-naturally occurring amino acids can also be incorporated. Alternatively, or in addition, the amino acid sequence can vary from SEQ ID NO:1 (which may be considered the “reference” sequence) by virtue of containing and addition and/or deletion of one or more amino acid residues. More specifically, the amino acid sequence can differ from that of SEQ ID NO:1 by virtue of a mutation at least one of the following positions of SEQ ID NO:1: 1, 4, 8, 9, 10, 11, 13, 15, 26, 29, 30, 31, 35, 37, 46, 48, 49, 54, 61, 64, 67, 68, 69, 71, 73, 74, 75, 76, 79, 88, 89, 90, 92, 99, 101, 103, 114, 125, 128, or 133 (or combinations thereof). As noted, as few as one of these positions may be altered, as may two, three, four, five, six, seven, eight, nine, ten, or 11 or more (including up to all) of the positions. For example, the amino acid sequence can differ from SEQ ID NO:1 at positions 69 and 74 and further at one or more of positions 30, 35, and 128. The amino acid sequence can also differ from SEQ ID NO:2 (as disclosed in U.S. Pat. No. 7,569,215, incorporated herein by reference) at one of the following sets of positions: (a) positions 64, 69, and 74; (b) positions 69, 74, and 101; (c) positions 69, 74, and 128; (d) positions 30, 69, 74, and 103; (e) positions 49, 69, 73, and 76; (f) positions 69, 74, 101, and 133; (g) positions 30, 69, 74, and 128; (h) positions 69, 74, 88, and 99; (i) positions 30, 69, 74, and 128; (j) positions 9, 11, 35, 69, and 74; (k) positions 1, 46, 49, 61, 69, and 79; (1) positions 48, 68, 71, 90, 103, and 114; (m) positions 4, 10, 11, 69, 74, 88, and 133; (n) positions 15, 30 31, 35, 48, 69, 74, and 92; (0) positions 30, 68, 69, 71, 74, 75, 76, and 90; (p) positions 30, 31, 37, 69, 73, 74, 79, and 128; (q) positions 26, 29, 30, 54, 67, 69, 74, and 92; (r) positions 8, 13, 26, 30, 35, 37, 69, 74, and 92; and (s) positions 29, 31, 35, 37, 48, 69, 71, 74, 88, and 89. Aside from mutations at these positions, the amino acid sequence of the mutant IL-2 polypeptide can otherwise be identical to SEQ ID NO:1. With respect to specific substitutions, the amino acid sequence can differ from SEQ ID NO:1 by virtue of having one or more of the following mutations: A1T, S4P, K8R, K9T, T10A, Q11R, Q13R, E15K, N26D, N29S, N30S, N30D, N30T, Y31H, Y31C, K35R, T37A, T37R, M46L, K48E, K49R, K49E, K54R, E61D, K64R, E67G, E68D, V69A, N71T, N71A, N71R, A73V, Q74P, S75P, K76E, K76R, H79R, N88D, I89V, N90H, I92T, S99P, T101A, F103S, 1114V, I128T, I128A, T133A, or T133N. Our nomenclature is consistent with that of the scientific literature, where the single letter code of the amino acid in the wild-type or reference sequence is followed by its position within the sequence and then by the single letter code of the amino acid with which it is replaced. Thus, AlT designates a substitution of the alanine residue a position 1 with threonine. Other mutant polypeptides within the scope of the invention include those that include a mutant of SEQ ID NO:2 having substitutions at V69 (e.g. A) and Q74 (e.g., P). For example, the amino acid sequence can include one of the following sets of mutations with respect to SEQ ID NO:2: (a) K64R, V69A, and Q74P; (b) V69A, Q74P, and T101A; (c) V69A, Q74P, and I128T; (d) N30D, V69A, Q74P, and F103S; (e) K49E, V69A, A73V, and K76E; (f) V69A, Q74P, T101A, and T133N; (g) N30S, V69A, Q74P, and I128A; (h) V69A, Q74P, N88D, and S99P; (i) N30S, V69A, Q74P, and I128T; (j) K9T, Q11R, K35R, V69A, and Q74P; (k) A1T, M46L, K49R, E61D, V69A, and H79R; (1) K48E, E68D, N71T, N90H, F103S, and I114V; (m) S4P, T10A, Q11R, V69A, Q74P, N88D, and T133A; (n) E15K, N30S Y31H, K35R, K48E, V69A, Q74P, and I92T; (o) N30S, E68D, V69A, N71A, Q74P, S75P, K76R, and N90H; (p) N30S, Y31C, T37A, V69A, A73V, Q74P, H79R, and I128T; (q) N26D, N29S, N30S, K54R, E67G, V69A, Q74P, and I92T; (r) K8R, Q13R, N26D, N30T, K35R, T37R, V69A, Q74P, and I92T; and (s) N29S, Y31H, K35R, T37A, K48E, V69A, N71R, Q74P, N88D, and I89V. SEQ ID NO:2 is disclosed in U.S. Pat. No. 7,569,215, which is incorporated herein by reference as an exemplary IL-2 polypeptide sequence that can be used in the invention.

[0210] As noted above, any of the mutant IL-2 polypeptides disclosed herein can include the sequences described; they can also be limited to the sequences described and otherwise identical to SEQ ID NO:1. Moreover, any of the mutant IL-2 polypeptides described herein can optionally include a substitution of the cysteine residue at position 125 with another residue (e.g., serine) and/or can optionally include a deletion of the alanine residue at position 1 of SEQ ID NO:1.

[0211] The mutant IL-2 polypeptides disclosed herein can bind to the IL-2Rα subunit with a K_{d} of less than about 28 nM (e.g., less than about 25 nM; less than about 5 nM; about 1 nM; less than about 500 pM; or less than about 100 pM). More specifically, a mutant IL-2 polypeptide can have an affinity equilibrium constant less than 1.0 nM (e.g., about 0.8, 0.6, 0.4, or 0.2 nM). Affinity can also be expressed as a relative rate of dissociation from an IL-2Rα subunit or from an IL-2 receptor complex (e.g., a complex expressed on the surface of a cell or otherwise membrane bound). For example, the mutant IL-2 polypeptides can dissociate from, e.g., IL-2Rα, at a decreased rate relative to a wild-type polypeptide or to an IL-2 based therapeutic, e.g., IL-2*. Alternatively, affinity can be characterized as the time, or average time, an IL-2* polypeptide persists on, for example, the surface of a cell expressing an IL-2R. For example, an IL-2*polypeptide can persist on the receptor for at least about 2, 5, 10, 50, 100, or 250 times (or more).

[0212] Disclosed are materials, compositions, and components that can be used for, can be used in conjunction with, can be used in preparation for, or are products of the disclosed methods and compositions. These and other materials are disclosed herein, and it is understood that when combinations, subsets, interactions, groups, etc. of these materials are disclosed that while specific reference of each various individual and collective combinations and permutations of these compounds may not be explicitly disclosed, each is specifically contemplated and described herein. For example, if a method is disclosed and discussed and a number of modifications that can be made to a number of molecules including the method are discussed, each and every combination and permutation of the method, and the modifications that are possible are specifically contemplated unless specifically indicated to the contrary. Likewise, any subset or combination of these is also specifically contemplated and disclosed. This concept applies to all aspects of this disclosure including, but not limited to, steps in methods using the disclosed compositions. Thus, if there are a variety of additional steps that can be performed, it is understood that each of these additional steps can be performed with any specific method steps or combination of method steps of the disclosed methods, and that each such combination or subset of combinations is specifically contemplated and should be considered disclosed.

[0213] Publications cited herein and the material for which they are cited are hereby specifically incorporated by reference in their entireties.

### EXAMPLES

[0214] The following are examples of methods and compositions of the invention. It is understood that various other embodiments may be practiced, given the general description provided herein.

### Example 1

### Detection of IL-2, IL-2 Mutein, IL-2Rα and IL-2Rγ in Fusion Proteins by ELISA

[0215] IL-2 mutein is detected with a commercially available antibody, e.g., the anti-IL-2 monoclonal (JES6-1A12) (BD Pharmingen; San Jose, Calif.). A positive control is used to show whether the monoclonal antibody recognizes the cytokine or mutein. Antibodies against IL-2Rα and IL-2Rγ chain are also used. Wells of a 96-well plate are coated with an antibody (2.5 μg/ml) in PBS. Wells are blocked with 5% non-fat milk in PBS with 0.2% Tween®20 (PBS-M-Tw) and fusion proteins are added for 1-2 hours at 37° C. After washing, an anti-IL-2 biotin-labeled antibody, e.g., JES5H4 (BD Pharmingen) is added and binding is detected using Strepavidin HRP (Southern Biotechnology Associates; Birmingham, Ala.). The ELISA plate is developed by adding 50 μl O-phenylenediamine (OPD) (Sigma-Aldrich) in 0.1M Citrate pH 4.5 and 0.04% H_{b}O₂, stopped by adding 50 μl/well 2N H₂SO₄ and the absorbance was read at 490 nm.

### Example 2

### Protease Cleavage of Fusion Protein by MMP9 Protease

[0216] One of skill in the art would be familiar with methods of setting up protein cleavage assay. 100 ug of protein in 1×PBS pH 7.4 were cleaved with 1 μg active MMP9 (Sigma catalog #SAE0078-50 or Enzo catalog BML-SE360) and incubated at room temperature for up to 16 hours. Digested protein is subsequently used in functional assays or stored at −80° C. prior to testing. Extent of cleavage was monitored by SDS PAGE using methods well known in the art. As shown in FIGS. 10, 13, 18A, 18B, 24B, 24C, and 27A full cleavage of the fusion proteins by MMP9 protease is seen.

### Example 3

### CTLL-2 Assay

[0217] CTLL2 cells (ATCC) were plated in suspension at a concentration of 500,000 cells/well in culture media with or without 40mg/ml human serum albumin (HSA) and stimulated with a dilution series of recombinant hIL2 or activatable hIL2 for 72 hours at 37° C. and 5% CO₂. Activity of uncleaved and cleaved activatable hIL2 was tested. Cleaved activatable hIL2 was generated by incubation with active MMP9. Cell activity was assessed using a CellTiter-Glo (Promega) luminescence-based cell viability assay. Results are shown in FIGS. 8, 9, and 25.

### Example 4

### Protease Cleavage of the IL-2/IL-2Rα/IL-2Rγ Chimeric Polypeptide Results in Increased Accessibility to Antibodies and Biologically Active IL-2 Mutein

[0218] The IL-2 mutein fusion proteins are biochemically characterized before and after cleavage with a protease, e.g., PSA. Immunoblot analyses will show that the fusion proteins can be cleaved by PSA and that there is an increase in intensity of the predicted low molecular weight cleavage product of approximately 20 kDa reactive with an anti-IL-2 antibody after treatment of the samples with PSA. The degree of cleavage is dependent upon the amount of PSA as well as the time of incubation. Interestingly, when the fusion protein is analyzed before and after PSA treatment by ELISA, it was found that the apparent amount of IL-2 is increased after PSA cleavage. In this experiment, there is an approximately 2 or 4-fold increase in the apparent amount of IL-2 detected using this sandwich ELISA depending on the construct, suggesting that the antibody binding is partially hindered in the intact fusion protein. Aliquots of the same samples are also analyzed after PSA treatment using the CTLL-2 cell line that requires IL-2 for growth and survival and the viability of cells can be ascertained using the colorimetric MTT assay. In this assay, the more a supernatant can be diluted, the more biologically active IL-2 it contains, and there is an increase in the amount of biologically active IL-2 after PSA cleavage. The amount of IL-2 mutein increase will suggest that after PSA cleavage there is an increase in the predicted low molecular weight cleavage fragment of approximately 20 kDa reactive with an anti-IL-2 antibody, an increase in antibody accessibility, and most importantly, an increase in the amount of biologically active IL-2 mutein.

### Example 5

### In Vivo Delivery of a Protease Activated Fusion Protein Results in Decreased Tumor Growth

[0219] The chimeric polypeptide is examined to determine if it could have biological effects in vivo. For these experiments a system is used in which tumor cells injected intraperitoneally rapidly and preferentially attach and grow initially on the milky spots, a series of organized immune aggregates found on the omentum (Gerber et al., Am. J. Pathol. 169:1739-52 (2006)). This system offers a convenient way to examine the effects of fusion protein treatment on tumor growth since fusion proteins can be delivered intraperitoneally multiple times and tumor growth can be analyzed by examining the dissociated omental cells. For these experiments, the Colon 38 cell line, a rapidly growing tumor cell line that expresses both MMP2 and MMP9 in vitro, may be used. The omental tissue normally expresses a relatively small amount of MMP2 and MMP9, but, when Colon 38 tumor is present on the omentum, MMP levels increase. Using this tumor model, the ability of IL-2 mutein fusion proteins to affect tumor growth is examined. Colon 38 cells are injected intraperitoneally, allowed to attach and grow for 1 day, and then treated daily with fusion protein interaperitoneally. At day 7, the animals are sacrificed and the omenta examined for tumor growth using flow cytometry and by a colony-forming assay.

### Example 6

### Construction of an Exemplary Activatable IL2 Protein Targeting CD20

[0220] Generation of an activatable IL2 Domain

[0221] An IL-2 polypeptide capable of binding to CD20 polypeptide present in a tumor or on a tumor cell is produced as follows. A nucleic acid is produced that contains nucleic acid sequences: (1) encoding an IFNγ polypeptide sequence and (2) one or more polypeptide linkers. Activatable interleukin plasmid constructs can have optional Flag, His or other affinity tags, and are electroporated into HEK293 or other suitable human or mammalian cell lines and purified. Validation assays include T cell activation assays using T cells responsive to IFNγ stimulation in the presence of a protease.

Generation of a scFv CD20 Binding Domain

[0222] CD20 is one of the cell surface proteins present on B-lymphocytes. CD20 antigen is found in normal and malignant pre-B and mature B lymphocytes, including those in over 90% of B-cell non-Hodgkin's lymphomas (NHL). The antigen is absent in hematopoietic stem cells, activated B lymphocytes (plasma cells) and normal tissue. As such, several antibodies mostly of murine origin have been described: 1F5, 2B8/C2B8, 2H7, and 1H4.

[0223] Human or humanized anti-CD20 antibodies are therefore used to generate scFv sequences for CD20 binding domains of an activatable interleukin protein. DNA sequences coding for human or humanized VL and VH domains are obtained, and the codons for the constructs are, optionally, optimized for expression in cells from Homo sapiens. The order in which the VL and VH domains appear in the scFv is varied (i.e., VL-VH, or VH-VL orientation), and three copies of the “G4S” (SEQ ID NO.: 449) or “G₄S” (SEQ ID NO.: 449) subunit (G₄S)₃ (SEQ ID NO.: 452) connect the variable domains to create the scFv domain. Anti-CD20 scFv plasmid constructs can have optional Flag, His or other affinity tags, and are electroporated into HEK293 or other suitable human or mammalian cell lines and purified. Validation assays include binding analysis by FACS, kinetic analysis using Proteon, and staining of CD20-expressing cells.

### Cloning of DNA Expression Constructs Encoding the Activatable IL2 Protein

[0224] The activatable IL2 construct with protease cleavage site domains are used to construct an activatable interleukin protein in combination with an anti-CD20 scFv domain and a serum half-life extension element (e.g., a HSA binding peptide or VH domain). For expression of an activatable interleukin protein in CHO cells, coding sequences of all protein domains are cloned into a mammalian expression vector system. In brief, gene sequences encoding the activatable interleukin domain, serum half-life extension element, and CD20 binding domain along with peptide linkers L1 and L2 are separately synthesized and subcloned. The resulting constructs are then ligated together in the order of CD20 binding domain—L1—IL2 subunit 1—L2—protease cleavage domain—L3—IL2 subunit 2—L4—anti-CD20 scFv—L5—serum half-life extension element to yield a final construct. All expression constructs are designed to contain coding sequences for an N-terminal signal peptide and a C-terminal hexahistidine (6× His)-tag (SEQ ID NO. 354) to facilitate protein secretion and purification, respectively.

### Expression of Activatable IL2 Proteins in Stably Transfected CHO Cells

[0225] A CHO cell expression system (Flp-In®, Life Technologies), a derivative of CHO-K1 Chinese Hamster ovary cells (ATCC, CCL-61) (Kao and Puck, Proc. Natl. Acad Sci USA 1968;60(4):1275-81), is used. Adherent cells are subcultured according to standard cell culture protocols provided by Life Technologies.

[0226] For adaption to growth in suspension, cells are detached from tissue culture flasks and placed in serum-free medium. Suspension-adapted cells are cryopreserved in medium with 10% DMSO.

[0227] Recombinant CHO cell lines stably expressing secreted activatable interleukin proteins are generated by transfection of suspension-adapted cells. During selection with the antibiotic Hygromycin B viable cell densities are measured twice a week, and cells are centrifuged and resuspended in fresh selection medium at a maximal density of 0.1×10⁶ viable cells/mL. Cell pools stably expressing activatable interleukin proteins are recovered after 2-3 weeks of selection at which point cells are transferred to standard culture medium in shake flasks. Expression of recombinant secreted proteins is confirmed by performing protein gel electrophoresis or flow cytometry. Stable cell pools are cryopreserved in DMSO containing medium.

[0228] Activatable IL2 proteins are produced in 10-day fed-batch cultures of stably transfected CHO cell lines by secretion into the cell culture supernatant. Cell culture supernatants are harvested after 10 days at culture viabilities of typically >75%. Samples are collected from the production cultures every other day and cell density and viability are assessed. On day of harvest, cell culture supernatants are cleared by centrifugation and vacuum filtration before further use.

[0229] Protein expression titers and product integrity in cell culture supernatants are analyzed by SDS-PAGE.

### Purification of Activatable IL2 Proteins

[0230] Activatable IL2 proteins are purified from CHO cell culture supernatants in a two-step procedure. The constructs are subjected to affinity chromatography in a first step followed by preparative size exclusion chromatography (SEC) on Superdex 200 in a second step. Samples are buffer-exchanged and concentrated by ultrafiltration to a typical concentration of >1 mg/mL. Purity and homogeneity (typically >90%) of final samples are assessed by SDS PAGE under reducing and non-reducing conditions, followed by immunoblotting using an anti-HSA or anti idiotype antibody as well as by analytical SEC, respectively. Purified proteins are stored at aliquots at −80° C. until use.

### Example 7

### Determination of Antigen Affinity by Flow Cytometry

[0231] The activatable interleukin proteins of Example 6 are tested for their binding affinities to human CD20⁺ cells and cynomolgus CD20⁺ cells.

[0232] CD20⁺ cells are incubated with 100 μL of serial dilutions of the activatable interleukin proteins of Example 1 and at least one protease. After washing three times with FACS buffer the cells are incubated with 0.1 mL of 10 μg/mL mouse monoclonal anti-idiotype antibody in the same buffer for 45 min on ice. After a second washing cycle, the cells are incubated with 0.1 mL of 15 μg/mL FITC-conjugated goat anti-mouse IgG antibodies under the same conditions as before. As a control, cells are incubated with the anti-His IgG followed by the FITC-conjugated goat anti-mouse IgG antibodies without the activatable IL2 proteins. The cells were then washed again and resuspended in 0.2 mL of FACS buffer containing 2 μg/mL propidium iodide (PI) in order to exclude dead cells. The fluorescence of 1×10⁴ living cells is measured using a Beckman-Coulter FC500 MPL flow cytometer using the MXP software (Beckman-Coulter, Krefeld, Germany) or a Millipore Guava EasyCyte flow cytometer using the Incyte software (Merck Millipore, Schwalbach, Germany). Mean fluorescence intensities of the cell samples are calculated using CXP software (Beckman-Coulter, Krefeld, Germany) or Incyte software (Merck Millipore, Schwalbach, Germany). After subtracting the fluorescence intensity values of the cells stained with the secondary and tertiary reagents alone the values are then used for calculation of the K_{D} values with the equation for one-site binding (hyperbola) of the GraphPad Prism (version 6.00 for Windows, GraphPad Software, La Jolla Calif. USA).

[0233] CD20 binding and crossreactivity are assessed on the human CD20⁺ tumor cell lines. The K_{D} ratio of crossreactivity is calculated using the K_{D} values determined on the CHO cell lines expressing either recombinant human or recombinant cynomolgus antigens.

### Example 8

### Cytotoxicity Assay

[0234] The activatable interleukin protein of Example 6 is evaluated in vitro on its mediation of immune response to CD20⁺ target cells.

[0235] Fluorescence labeled CD20⁺ REC-1 cells (a Mantle cell lymphoma cell line, ATCC CRL-3004) are incubated with isolated PBMC of random donors or CB15 T-cells (standardized T-cell line) as effector cells in the presence of the activatable IL2 protein of Example 5 and at least one protease. After incubation for 4 h at 37° C. in a humidified incubator, the release of the fluorescent dye from the target cells into the supernatant is determined in a spectrofluorimeter. Target cells incubated without the activatable IL2 protein of Example land target cells totally lysed by the addition of saponin at the end of the incubation serve as negative and positive controls, respectively.

[0236] Based on the measured remaining living target cells, the percentage of specific cell lysis is calculated according to the following formula: [1-(number of living targets₍ₛₐₘₚₗₑ₎/number of living targets₍ₛₚₒₙₜₐₙₑₒᵤₛ₎)]×100%. Sigmoidal dose response curves and EC₅₀ values are calculated by non-linear regression/4-parameter logistic fit using the GraphPad Software. The lysis values obtained for a given antibody concentration are used to calculate sigmoidal dose-response curves by 4 parameter logistic fit analysis using the Prism software.

### Example 9

### Pharmacokinetics of Activatable Interleukin Proteins

[0237] The activatable interleukin protein of Example 6 is evaluated for half-time elimination in animal studies.

[0238] The activatable IL2 protein is administered to cynomolgus monkeys as a 0.5 mg/kg bolus injection into the saphenous vein. Another cynomolgus monkey group receives a comparable IL2 construct in size, but lacking a serum half-life extension element. A third and fourth group receive an IL2 construct with serum half-life extension element and a cytokine with CD20 and serum half-life extension elements respectively, and both comparable in size to the activatable interleukin protein. Each test group consists of 5 monkeys. Serum samples are taken at indicated time points, serially diluted, and the concentration of the proteins is determined using a binding ELISA to CD20.

[0239] Pharmacokinetic analysis is performed using the test article plasma concentrations. Group mean plasma data for each test article conforms to a multi-exponential profile when plotted against the time post-dosing. The data are fit by a standard two-compartment model with bolus input and first-order rate constants for distribution and elimination phases. The general equation for the best fit of the data for i.v. administration is: c(t)=Ae^{-αt}+Be^{-βt}, where c(t) is the plasma concentration at time t, A and B are intercepts on the Y-axis, and α and β are the apparent first-order rate constants for the distribution and elimination phases, respectively. The -phase is the initial phase of the clearance and reflects distribution of the protein into all extracellular fluid of the animal, whereas the second or β-phase portion of the decay curve represents true plasma clearance. Methods for fitting such equations are well known in the art. For example, A=DN(α−k21)/(α−β), B=D/V(β−k21)/(α−β), and α and β for α>β) are roots of the quadratic equation: r²+(k12+k21+k10)r+k21k10=0 using estimated parameters of V=volume of distribution, k 10=elimination rate, k 12=transfer rate from compartment 1 to compartment 2 and k21=transfer rate from compartment 2 to compartment 1, and D=the administered dose.

[0240] Data analysis: Graphs of concentration versus time profiles are made using KaleidaGraph (KaleidaGraph™V. 3.09 Copyright 1986-1997. Synergy Software. Reading, Pa.). Values reported as less than reportable (LTR) are not included in the PK analysis and are not represented graphically. Pharmacokinetic parameters are determined by compartmental analysis using WinNonlin software (WinNonlin® Professional V. 3.1 WinNonlin™ Copyright 1998-1999. Pharsight Corporation. Mountain View, Calif.). Pharmacokinetic parameters are computed as described in Ritschel W A and Kearns G L, 1999, IN: Handbook Of Basic Pharmacokinetics Including Clinical Applications, 5th edition, American Pharmaceutical Assoc., Washington, D.C.

[0241] It is expected that the activatable interleukin protein of Example 5 has improved pharmacokinetic parameters such as an increase in elimination half-time as compared to proteins lacking a serum half-life extension element.

### Example 10

### Xenograft Tumor Model

[0242] The activatable IL2 protein of Example 6 is evaluated in a xenograft model.

[0243] Female immune-deficient NOD/scid mice are sub-lethally irradiated (2 Gy) and subcutaneously inoculated with 4×10⁶ Ramos RA1 cells into the right dorsal flank. When tumors reach 100 to 200 mm³, animals are allocated into 3 treatment groups. Groups 2 and 3 (8 animals each) are intraperitoneally injected with 1.5×10⁷ activated human T-cells. Three days later, animals from Group 3 are subsequently treated with a total of 9 intravenous doses of 50 μg activatable interleukin protein of Example 1 (qd×9d). Groups 1 and 2 are only treated with vehicle. Body weight and tumor volume are determined for 30 days.

[0244] It is expected that animals treated with the activatable interleukin protein of Example 5 have a statistically significant delay in tumor growth in comparison to the respective vehicle-treated control group.

[0245] While preferred embodiments of the present invention have been shown and described herein, it will be obvious to those skilled in the art that such embodiments are provided by way of example only. Numerous variations, changes, and substitutions will now occur to those skilled in the art without departing from the invention. It should be understood that various alternatives to the embodiments of the invention described herein may be employed in practicing the invention. It is intended that the following claims define the scope of the invention and that methods and structures within the scope of these claims and their equivalents be covered thereby.

### Example 11

### Mouse IFNγ WEHI Cell Survival Assay

[0246] WEHI279 cells (ATCC) were plated in suspension at a concentration of 25,000 cells/well in culture media with or without 1.5% human serum albumin (HSA) and stimulated with a dilution series of recombinant mIFNγ or inducible mIFNγ for 72 hours at 37° C. and 5% CO₂. Activity of uncleaved and cleaved inducible mIFNγ was tested. Cleaved inducible mIFNg was generated by incubation with active MMP9. Cell survival was assessed using a CellTiter-Glo (Promega) luminescence-based cell viability assay. The EC50 values for cleaved inducible mIFNg molecules were at least 100× more potent than un-cleaved inducible mIFNg molecules. As shown in FIGS. 16A-16F, greater inducibility was seen in assays wherein the culture media contained human serum albumin.

### Example 12

### Mouse IFNγ B16 Reporter and Mouse IFNα/β B16 Reporter Cell Assays

[0247] B16-Blue IFNγ cells (InvivoGen) were plated at a concentration of 75,000 cells/well in culture media with or without 1.5% human serum albumin (HSA) and stimulated with a dilution series of recombinant mIFNγ or inducible mIFNγ for 24 hours at 37° C. and 5% CO₂. Activity of uncleaved and cleaved inducible mIFNγ was tested. Cleaved inducible mIFNγ was generated by incubation with active MMP9. Supernatants were harvested, and SEAP activation was assessed by adding QUANTI-Blue Reagent (InvivoGen), incubating at 37° C. for 2 hours, and measuring absorbance at 620 nm. Results are shown in FIGS. 17, 19, 22, 23, and 28. This experiment was repeated with for IFNα fusion proteins using B16-Blue IFNα/β cells. The EC50 values for cleaved inducible mIFNα molecules were at least 100× more potent than un-cleaved inducible mIFNα molecules.

### Example 13

### In Vivo Delivery of a Protease Activated Fusion Protein Results in Decreased Tumor Growth

[0248] The chimeric polypeptide is examined to determine if it could have biological effects in vivo. For these experiments a system is used in which tumor cells injected intraperitoneally rapidly and preferentially attach and grow initially on the milky spots, a series of organized immune aggregates found on the omentum (Gerber et al., Am. J. Pathol. 169:1739-52 (2006)). This system offers a convenient way to examine the effects of fusion protein treatment on tumor growth since fusion proteins can be delivered intraperitoneally multiple times and tumor growth can be analyzed by examining the dissociated omental cells. For these experiments, the Colon 38 cell line, a rapidly growing tumor cell line that expresses both MMP2 and MMP9 in vitro, may be used. The omental tissue normally expresses a relatively small amount of MMP2 and MMP9, but, when Colon 38 tumor is present on the omentum, MMP levels increase. Using this tumor model, the ability of IFN fusion proteins to affect tumor growth is examined. Colon 38 cells are injected intraperitoneally, allowed to attach and grow for 1 day, and then treated daily with fusion protein interaperitoneally. At day 7, the animals are sacrificed and the omenta examined for tumor growth using flow cytometry and by a colony-forming assay.

### Example 13b

### The Chimeric Polypeptide was Examined to Determine its Biological Effects In Vivo

[0249] The MC38 cell line, a rapidly growing colon adenocarcinoma cell line that expresses MMP9 in vitro, was used. Using this tumor model, the ability of IFNγ fusion proteins to affect tumor growth was examined. MC38 cells were injected subcutaneously, allowed to grow for 10-14 days, and then treated with fusion protein twice weekly intraperitoneally for a total of four doses, at the levels shown in FIGS. 21A-21D. As a comparator, wild-type mIFNγ was administered at the dose levels indicated, twice daily for 2 weeks on a 5 day on/2 day off schedule (10 total doses). Tumor growth and body weight were monitored approximately twice per week for two weeks.

### Example 14

### Construction of an Exemplary IFNγ Protein Targeting CD20

### Generation of an Activatable Cytokine Domain

[0250] An IFNγ polypeptide capable of binding to CD20 polypeptide present in a tumor or on a tumor cell is produced as follows. A nucleic acid is produced that contains nucleic acid sequences: (1) encoding an IFNγ polypeptide sequence and (2) one or more polypeptide linkers. Activatable IFNγ plasmid constructs can have optional Flag, His or other affinity tags, and are electroporated into HEK293 or other suitable human or mammalian cell lines and purified. Validation assays include T cell activation assays using T cells responsive to IFNγ stimulation in the presence of a protease.

Generation of a scFv CD20 Binding Domain

[0251] CD20 is one of the cell surface proteins present on B-lymphocytes. CD20 antigen is found in normal and malignant pre-B and mature B lymphocytes, including those in over 90% of B-cell non-Hodgkin's lymphomas (NHL). The antigen is absent in hematopoietic stem cells, activated B lymphocytes (plasma cells) and normal tissue. As such, several antibodies mostly of murine origin have been described: 1F5, 2B8/C2B8, 2H7, and 1H4.

[0252] Human or humanized anti-CD20 antibodies are therefore used to generate scFv sequences for CD20 binding domains of an activatable IFNγ protein. DNA sequences coding for human or humanized VL and VH domains are obtained, and the codons for the constructs are, optionally, optimized for expression in cells from Homo sapiens. The order in which the VL and VH domains appear in the scFv is varied (i.e., VL-VH, or VH-VL orientation), and three copies of the “G4S” (SEQ ID NO.: 449) or “G₄S” (SEQ ID NO.: 449) subunit (G₄S)₃ (SEQ ID NO.: 452) connect the variable domains to create the scFv domain. Anti-CD20 scFv plasmid constructs can have optional Flag, His or other affinity tags, and are electroporated into HEK293 or other suitable human or mammalian cell lines and purified. Validation assays include binding analysis by FACS, kinetic analysis using Proteon, and staining of CD20-expressing cells.

### Cloning of DNA Expression Constructs Encoding the Activatable IFNγ Protein

[0253] The activatable IFNγ construct with protease cleavage site domains are used to construct an activatable IFNγ protein in combination with an anti-CD20 scFv domain and a serum half-life extension element (e.g., a HSA binding peptide or VH domain), with the domains organized as shown in FIG. 14. For expression of an activatable IFNγ protein in CHO cells, coding sequences of all protein domains are cloned into a mammalian expression vector system. In brief, gene sequences encoding the activatable IFNγ domain, serum half-life extension element, and CD20 binding domain along with peptide linkers L1 and L2 are separately synthesized and subcloned. The resulting constructs are then ligated together in the order of CD20 binding domain—L1—IFNγ subunit 1—L2—protease cleavage domain—L3—IFNγ subunit2—L4—anti-CD20 scFv—L5-serum half-life extension element to yield a final construct. All expression constructs are designed to contain coding sequences for an N-terminal signal peptide and a C-terminal hexahistidine (6× His)-tag (SEQ ID NO.: 354) to facilitate protein secretion and purification, respectively.

### Expression of Activatable IFNγ Proteins in Stably Transfected CHO Cells

[0254] A CHO cell expression system (Flp-In®, Life Technologies), a derivative of CHO-K1 Chinese Hamster ovary cells (ATCC, CCL-61) (Kao and Puck, Proc. Natl. Acad Sci USA 1968;60(4):1275-81), is used. Adherent cells are subcultured according to standard cell culture protocols provided by Life Technologies.

[0255] For adaption to growth in suspension, cells are detached from tissue culture flasks and placed in serum-free medium. Suspension-adapted cells are cryopreserved in medium with 10% DMSO.

[0256] Recombinant CHO cell lines stably expressing secreted activatable IFNγ proteins are generated by transfection of suspension-adapted cells. During selection with the antibiotic Hygromycin B viable cell densities are measured twice a week, and cells are centrifuged and resuspended in fresh selection medium at a maximal density of 0.1×10⁶ viable cells/mL. Cell pools stably expressing activatable IFNγ proteins are recovered after 2-3 weeks of selection at which point cells are transferred to standard culture medium in shake flasks. Expression of recombinant secreted proteins is confirmed by performing protein gel electrophoresis or flow cytometry. Stable cell pools are cryopreserved in DMSO containing medium.

[0257] Activatable IFNγ proteins are produced in 10-day fed-batch cultures of stably transfected CHO cell lines by secretion into the cell culture supernatant. Cell culture supernatants are harvested after 10 days at culture viabilities of typically >75%. Samples are collected from the production cultures every other day and cell density and viability are assessed. On day of harvest, cell culture supernatants are cleared by centrifugation and vacuum filtration before further use.

[0258] Protein expression titers and product integrity in cell culture supernatants are analyzed by SDS-PAGE.

### Purification of Activatable IFNγ Proteins

[0259] Activatable IFNγ proteins are purified from CHO cell culture supernatants in a two-step procedure. The constructs are subjected to affinity chromatography in a first step followed by preparative size exclusion chromatography (SEC) on Superdex 200 in a second step. Samples are buffer-exchanged and concentrated by ultrafiltration to a typical concentration of >1 mg/mL. Purity and homogeneity (typically >90%) of final samples are assessed by SDS PAGE under reducing and non-reducing conditions, followed by immunoblotting using an anti-HSA or anti idiotype antibody as well as by analytical SEC, respectively. Purified proteins are stored at aliquots at −80° C. until use.

### Example 15

### Determination of Antigen Affinity by Flow Cytometry

[0260] The activatable IFNγ proteins of Example 1 are tested for their binding affinities to human CD20⁺ cells and cynomolgus CD20⁺ cells.

[0261] CD20⁺ cells are incubated with 100 μL of serial dilutions of the activatable IFNγ proteins of Example 1 and at least one protease. After washing three times with FACS buffer the cells are incubated with 0.1 mL of 10μg/mL mouse monoclonal anti-idiotype antibody in the same buffer for 45 min on ice. After a second washing cycle, the cells are incubated with 0.1 mL of 15 μg/mL FITC-conjugated goat anti-mouse IgG antibodies under the same conditions as before. As a control, cells are incubated with the anti-His IgG followed by the FITC-conjugated goat anti-mouse IgG antibodies without the activatable IFNγ proteins. The cells were then washed again and resuspended in 0.2 mL of FACS buffer containing 2 μg/mL propidium iodide (PI) in order to exclude dead cells. The fluorescence of 1×10⁴ living cells is measured using a Beckman-Coulter FC500 MPL flow cytometer using the MXP software (Beckman-Coulter, Krefeld, Germany) or a Millipore Guava EasyCyte flow cytometer using the Incyte software (Merck Millipore, Schwalbach, Germany). Mean fluorescence intensities of the cell samples are calculated using CXP software (Beckman-Coulter, Krefeld, Germany) or Incyte software (Merck Millipore, Schwalbach, Germany). After subtracting the fluorescence intensity values of the cells stained with the secondary and tertiary reagents alone the values are then used for calculation of the K_{D} values with the equation for one-site binding (hyperbola) of the GraphPad Prism (version 6.00 for Windows, GraphPad Software, La Jolla Calif. USA).

[0262] CD20 binding and crossreactivity are assessed on the human CD20⁺ tumor cell lines. The K_{D} ratio of crossreactivity is calculated using the K_{D} values determined on the CHO cell lines expressing either recombinant human or recombinant cynomolgus antigens.

### Example 16

### Cytotoxicity Assay

[0263] The activatable IFNγ protein of Example 5 is evaluated in vitro on its mediation of immune response to CD20⁺ target cells.

[0264] Fluorescence labeled CD20⁺ REC-1 cells (a Mantle cell lymphoma cell line, ATCC CRL-3004) are incubated with isolated PBMC of random donors or CB15 T-cells (standardized T-cell line) as effector cells in the presence of the activatable IFNγ protein of Example 5 and at least one protease. After incubation for 4 h at 37° C. in a humidified incubator, the release of the fluorescent dye from the target cells into the supernatant is determined in a spectrofluorimeter. Target cells incubated without the activatable IFNγ protein of Example 5 and target cells totally lysed by the addition of saponin at the end of the incubation serve as negative and positive controls, respectively.

[0265] Based on the measured remaining living target cells, the percentage of specific cell lysis is calculated according to the following formula: [1-(number of living targets₍ₛₐₘₚₗₑ₎/number of living targets₍ₛₚₒₙₜₐₙₑₒᵤₛ₎)]×100%. Sigmoidal dose response curves and EC₅₀ values are calculated by non-linear regression/4-parameter logistic fit using the GraphPad Software. The lysis values obtained for a given antibody concentration are used to calculate sigmoidal dose-response curves by 4 parameter logistic fit analysis using the Prism software.

### Example 17

### Pharmacokinetics of Activatable IFNγ Proteins

[0266] The activatable IFNγ protein of Example 5 is evaluated for half-time elimination in animal studies.

[0267] The activatable IFNγ protein is administered to cynomolgus monkeys as a 0.5 mg/kg bolus injection into the saphenous vein. Another cynomolgus monkey group receives a comparable cytokine in size, but lacking a serum half-life extension element. A third and fourth group receive a cytokine with serum half-life extension elements and a cytokine with CD20 and serum half-life extension elements respectively, and both comparable in size to the activatable IFNγ protein. Each test group consists of 5 monkeys. Serum samples are taken at indicated time points, serially diluted, and the concentration of the proteins is determined using a binding ELISA to CD20.

[0268] Pharmacokinetic analysis is performed using the test article plasma concentrations. Group mean plasma data for each test article conforms to a multi-exponential profile when plotted against the time post-dosing. The data are fit by a standard two-compartment model with bolus input and first-order rate constants for distribution and elimination phases. The general equation for the best fit of the data for i.v. administration is: c(t)=Ae^{αt}+Be^{-βt}, where c(t) is the plasma concentration at time t, A and B are intercepts on the Y-axis, and α and β are the apparent first-order rate constants for the distribution and elimination phases, respectively. The α-phase is the initial phase of the clearance and reflects distribution of the protein into all extracellular fluid of the animal, whereas the second or β-phase portion of the decay curve represents true plasma clearance. Methods for fitting such equations are well known in the art. For example, A=D/V(α−k21)/(α−β), B=D/V((β−k21)/(α−β), and α and β for α>β) are roots of the quadratic equation: r²+(k12+k21+k10)r+k21k10=0 using estimated parameters of V=volume of distribution, k 10=elimination rate, k 12=transfer rate from compartment 1 to compartment 2 and k21=transfer rate from compartment 2 to compartment 1, and D=the administered dose.

[0269] Data analysis: Graphs of concentration versus time profiles are made using KaleidaGraph (KaleidaGraph™ V. 3.09 Copyright 1986-1997. Synergy Software. Reading, Pa.). Values reported as less than reportable (LTR) are not included in the PK analysis and are not represented graphically. Pharmacokinetic parameters are determined by compartmental analysis using WinNonlin software (WinNonlin® Professional V. 3.1 WinNonlin™ Copyright 1998-1999. Pharsight Corporation. Mountain View, Calif.). Pharmacokinetic parameters are computed as described in Ritschel W A and Kearns G L, 1999, IN: Handbook Of Basic Pharmacokinetics Including Clinical Applications, 5th edition, American Pharmaceutical Assoc., Washington, D.C.

[0270] It is expected that the activatable IFNγ protein of Example 5 has improved pharmacokinetic parameters such as an increase in elimination half-time as compared to proteins lacking a serum half-life extension element.

### Example 18

### Xenograft Tumor Model

[0271] The activatable IFNγ protein of Example 5 is evaluated in a xenograft model.

[0272] Female immune-deficient NOD/scid mice are sub-lethally irradiated (2 Gy) and subcutaneously inoculated with 4×10⁶ Ramos RA1 cells into the right dorsal flank. When tumors reach 100 to 200 mm³, animals are allocated into 3 treatment groups. Groups 2 and 3 (8 animals each) are intraperitoneally injected with 1.5×10⁷ activated human T-cells. Three days later, animals from Group 3 are subsequently treated with a total of 9 intravenous doses of 50 μg activatable IFNγ protein of Example 5 (qd×9d). Groups 1 and 2 are only treated with vehicle. Body weight and tumor volume are determined for 30 days.

[0273] It is expected that animals treated with the activatable IFNγ protein of Example 5 have a statistically significant delay in tumor growth in comparison to the respective vehicle-treated control group.

[0274] While preferred embodiments of the present invention have been shown and described herein, it will be obvious to those skilled in the art that such embodiments are provided by way of example only. Numerous variations, changes, and substitutions will now occur to those skilled in the art without departing from the invention. It should be understood that various alternatives to the embodiments of the invention described herein may be employed in practicing the invention. It is intended that the following claims define the scope of the invention and that methods and structures within the scope of these claims and their equivalents be covered thereby.

### Example 19

### HEK-Blue Assay

[0275] HEK-Blue IL12 cells (InvivoGen) were plated in suspension at a concentration of 250,000 cells/well in culture media with or without 40mg/ml human serum albumin (HSA) and stimulated with a dilution series of recombinant hIL12, chimeric IL12 (mouse p35/human p40) or activatable hIL12 for 24 hours at 37° C. and 5% CO₂. Activity of uncleaved and cleaved activatable hIL12 was tested. Cleaved inducible hIL12 was generated by incubation with active MMP9. IL12 activity was assessed by quantification of Secreted Alkaline Phosphatase (SEAP) activity using the reagent QUANTI-Blue (InvivoGen), a colorimetric based assay. Results are shown in FIGS. 11, 12, 15, and 26.

[0276] HEK-Blue IL2 cells (InvivoGen) were plated in suspension at a concentration of 50,000 cells/well in culture media with or without 15-40 mg/ml human serum albumin (HSA) and stimulated with a dilution series of recombinant hIL2 or activatable hIL2 for 24 hours at 37□C and 5% CO₂. Activity of uncleaved and cleaved activatable hIL2 was tested. Cleaved inducible hIL2 was generated by incubation with active MMP9. IL12 activity was assessed by quantification of Secreted Alkaline Phosphatase (SEAP) activity using the reagent QUANTI-Blue (InvivoGen), a colorimetric based assay. Results are shown in FIGS. 24A-24D.

### Example 20

### Splenocyte T-Blast Assay

[0277] T-Blasts were induced from murine splenocytes with a 6-day incubation with PHA and a 24hr incubation with recombinant hIL12. Tblasts were then plated in suspension at a concentration of 200,000 cells/well in culture media with or without 40 mg/ml human serum albumin (HSA) and stimulated with a dilution series of recombinant hIL12 or chimeric IL12 (mouse p35/human p40) or mouse IL12 for 72 hours at 37° C. and 5% CO₂. Activity of uncleaved and cleaved IL12 fusion proteins was tested. Cleaved inducible hIL12 was generated by incubation with active MMP9. IL12 activity was assessed by downstream quantification of IFNγ production using a mIFNγ alpha ELISA.

### Example 21

### In Vivo Delivery of a Protease Activated Fusion Protein Results in Decreased Tumor Growth

[0278] The chimeric polypeptide is examined to determine if it could have biological effects in vivo. For these experiments a system is used in which tumor cells injected intraperitoneally rapidly and preferentially attach and grow initially on the milky spots, a series of organized immune aggregates found on the omentum (Gerber et al., Am. J. Pathol. 169:1739-52 (2006)). This system offers a convenient way to examine the effects of fusion protein treatment on tumor growth since fusion proteins can be delivered intraperitoneally multiple times and tumor growth can be analyzed by examining the dissociated omental cells. For these experiments, the Colon 38 cell line, a rapidly growing tumor cell line that expresses both MMP2 and MMP9 in vitro, may be used. The omental tissue normally expresses a relatively small amount of MMP2 and MMP9, but, when Colon 38 tumor is present on the omentum, MMP levels increase. Using this tumor model, the ability of IL-2 mutein fusion proteins to affect tumor growth is examined. Colon 38 cells are injected intraperitoneally, allowed to attach and grow for 1 day, and then treated daily with fusion protein interaperitoneally. At day 7, the animals are sacrificed and the omenta examined for tumor growth using flow cytometry and by a colony-forming assay.

### Example 22

### Construction of an Exemplary Activatable Interleukin Protein Targeting CD20

### Generation of an Activatable Interleukin Domain

[0279] The human IL-12p35 chain canonical sequence is Uniprot Accession No. P29459. The human IL-12p40 chain canonical sequence is Uniprot Accession No. P29460. IL-12p35 and IL-12p40 are cloned into an expression construct. A protease cleavage site is included between the IL-12p35 and IL-12p40 domains. An IL-12 polypeptide capable of binding to CD20 polypeptide present in a tumor or on a tumor cell is produced as follows. A nucleic acid is produced that contains nucleic acid sequences: (1) encoding an IFNγ polypeptide sequence and (2) one or more polypeptide linkers. Activatable interleukin plasmid constructs can have optional Flag, His or other affinity tags, and are electroporated into HEK293 or other suitable human or mammalian cell lines and purified. Validation assays include T cell activation assays using T cells responsive to IL-12 stimulation in the presence of a protease.

Generation of a scFv CD20 Binding Domain

[0280] CD20 is one of the cell surface proteins present on B-lymphocytes. CD20 antigen is found in normal and malignant pre-B and mature B lymphocytes, including those in over 90% of B-cell non-Hodgkin's lymphomas (NHL). The antigen is absent in hematopoietic stem cells, activated B lymphocytes (plasma cells) and normal tissue. As such, several antibodies mostly of murine origin have been described: 1F5, 2B8/C2B8, 2H7, and 1H4.

[0281] Human or humanized anti-CD20 antibodies are therefore used to generate scFv sequences for CD20 binding domains of an activatable interleukin protein. DNA sequences coding for human or humanized VL and VH domains are obtained, and the codons for the constructs are, optionally, optimized for expression in cells from Homo sapiens. The order in which the VL and VH domains appear in the scFv is varied (i.e., VL-VH, or VH-VL orientation), and three copies of the “G4S” (SEQ ID NO.: 449) or “G₄S” (SEQ ID NO.: 449) subunit (G₄S)₃ (SEQ ID NO.: 452) connect the variable domains to create the scFv domain. Anti-CD20 scFv plasmid constructs can have optional Flag, His or other affinity tags, and are electroporated into HEK293 or other suitable human or mammalian cell lines and purified. Validation assays include binding analysis by FACS, kinetic analysis using Proteon, and staining of CD20-expressing cells.

### Cloning of DNA Expression Constructs Encoding the Activatable Interleukin Protein

[0282] The activatable interleukin construct with protease cleavage site domains are used to construct an activatable interleukin protein in combination with an anti-CD20 scFv domain and a serum half-life extension element (e.g., a HSA binding peptide or VH domain). For expression of an activatable interleukin protein in CHO cells, coding sequences of all protein domains are cloned into a mammalian expression vector system. In brief, gene sequences encoding the activatable interleukin domain, serum half-life extension element, and CD20 binding domain along with peptide linkers L1 and L2 are separately synthesized and subcloned. The resulting constructs are then ligated together in the order of CD20 binding domain—L1—IL-12p35—L2—protease cleavage domain—L3—IL-12p40—L4—anti-CD20 scFv—L5—serum half-life extension element to yield a final construct. All expression constructs are designed to contain coding sequences for an N-terminal signal peptide and a C-terminal hexahistidine (6× His)-tag (SEQ ID NO.: 354) to facilitate protein secretion and purification, respectively.

### Expression of Activatable Interleukin Proteins in Stably Transfected CHO Cells

[0283] A CHO cell expression system (Flp-In®, Life Technologies), a derivative of CHO-K1 Chinese Hamster ovary cells (ATCC, CCL-61) (Kao and Puck, Proc. Natl. Acad Sci USA 1968;60(4):1275-81), is used. Adherent cells are subcultured according to standard cell culture protocols provided by Life Technologies.

[0284] For adaption to growth in suspension, cells are detached from tissue culture flasks and placed in serum-free medium. Suspension-adapted cells are cryopreserved in medium with 10% DMSO.

[0285] Recombinant CHO cell lines stably expressing secreted activatable interleukin proteins are generated by transfection of suspension-adapted cells. During selection with the antibiotic Hygromycin B viable cell densities are measured twice a week, and cells are centrifuged and resuspended in fresh selection medium at a maximal density of 0.1×10⁶ viable cells/mL. Cell pools stably expressing activatable interleukin proteins are recovered after 2-3 weeks of selection at which point cells are transferred to standard culture medium in shake flasks. Expression of recombinant secreted proteins is confirmed by performing protein gel electrophoresis or flow cytometry. Stable cell pools are cryopreserved in DMSO containing medium.

[0286] Activatable interleukin proteins are produced in 10-day fed-batch cultures of stably transfected CHO cell lines by secretion into the cell culture supernatant. Cell culture supernatants are harvested after 10 days at culture viabilities of typically >75%. Samples are collected from the production cultures every other day and cell density and viability are assessed. On day of harvest, cell culture supernatants are cleared by centrifugation and vacuum filtration before further use.

[0287] Protein expression titers and product integrity in cell culture supernatants are analyzed by SDS-PAGE.

### Purification of Activatable Interleukin Proteins

[0288] Activatable interleukin proteins are purified from CHO cell culture supernatants in a two-step procedure. The constructs are subjected to affinity chromatography in a first step followed by preparative size exclusion chromatography (SEC) on Superdex 200 in a second step. Samples are buffer-exchanged and concentrated by ultrafiltration to a typical concentration of >1 mg/mL. Purity and homogeneity (typically >90%) of final samples are assessed by SDS PAGE under reducing and non-reducing conditions, followed by immunoblotting using an anti-HSA or anti idiotype antibody as well as by analytical SEC, respectively. Purified proteins are stored at aliquots at -80° C. until use.

### Example 23

### Determination of Antigen Affinity by Flow Cytometry

[0289] The activatable interleukin proteins of Example 5 are tested for their binding affinities to human CD20⁺ cells and cynomolgus CD20⁺ cells.

[0290] CD20⁺ cells are incubated with 100 μL of serial dilutions of the activatable interleukin proteins of Example 5 and at least one protease. After washing three times with FACS buffer the cells are incubated with 0.1 mL of 10 μg/mL mouse monoclonal anti-idiotype antibody in the same buffer for 45 min on ice. After a second washing cycle, the cells are incubated with 0.1 mL of 15 μg/mL FITC-conjugated goat anti-mouse IgG antibodies under the same conditions as before. As a control, cells are incubated with the anti-His IgG followed by the FITC-conjugated goat anti-mouse IgG antibodies without the activatable interleukin proteins. The cells were then washed again and resuspended in 0.2 mL of FACS buffer containing 2 μg/mL propidium iodide (PI) in order to exclude dead cells. The fluorescence of 1×10⁴ living cells is measured using a Beckman-Coulter FC500 MPL flow cytometer using the MXP software (Beckman-Coulter, Krefeld, Germany) or a Millipore Guava EasyCyte flow cytometer using the Incyte software (Merck Millipore, Schwalbach, Germany). Mean fluorescence intensities of the cell samples are calculated using CXP software (Beckman-Coulter, Krefeld, Germany) or Incyte software (Merck Millipore, Schwalbach, Germany). After subtracting the fluorescence intensity values of the cells stained with the secondary and tertiary reagents alone the values are then used for calculation of the K_{D} values with the equation for one-site binding (hyperbola) of the GraphPad Prism (version 6.00 for Windows, GraphPad Software, La Jolla Calif. USA).

[0291] CD20 binding and crossreactivity are assessed on the human CD20⁺ tumor cell lines. The K_{D} ratio of crossreactivity is calculated using the K_{D} values determined on the CHO cell lines expressing either recombinant human or recombinant cynomolgus antigens.

### Example 24

### Cytotoxicity Assay

[0292] The activatable interleukin protein of Example 5 is evaluated in vitro on its mediation of immune response to CD20⁺ target cells.

[0293] Fluorescence labeled CD20⁺ REC-1 cells (a Mantle cell lymphoma cell line, ATCC CRL-3004) are incubated with isolated PBMC of random donors or CB15 T-cells (standardized T-cell line) as effector cells in the presence of the activatable interleukin protein of Example 5 and at least one protease. After incubation for 4 h at 37° C. in a humidified incubator, the release of the fluorescent dye from the target cells into the supernatant is determined in a spectrofluorimeter. Target cells incubated without the activatable interleukin protein of Example Sand target cells totally lysed by the addition of saponin at the end of the incubation serve as negative and positive controls, respectively.

[0294] Based on the measured remaining living target cells, the percentage of specific cell lysis is calculated according to the following formula: [1-(number of living targets₍ₛₐₘₚₗₑ₎/number of living targets₍ₛₚₒₙₜₐₙₑₒᵤₛ₎)]×100%. Sigmoidal dose response curves and EC₅₀ values are calculated by non-linear regression/4-parameter logistic fit using the GraphPad Software. The lysis values obtained for a given antibody concentration are used to calculate sigmoidal dose-response curves by 4 parameter logistic fit analysis using the Prism software.

### Example 25

### Pharmacokinetics of Activatable Interleukin Proteins

[0295] The activatable interleukin protein of Example 5 is evaluated for half-time elimination in animal studies.

[0296] The activatable interleukin protein is administered to cynomolgus monkeys as a 0.5 mg/kg bolus injection into the saphenous vein. Another cynomolgus monkey group receives a comparable cytokine in size, but lacking a serum half-life extension element. A third and fourth group receive a cytokine with serum half-life extension elements and a cytokine with CD20 and serum half-life extension elements respectively, and both comparable in size to the activatable interleukin protein. Each test group consists of 5 monkeys. Serum samples are taken at indicated time points, serially diluted, and the concentration of the proteins is determined using a binding ELISA to CD20.

[0297] Pharmacokinetic analysis is performed using the test article plasma concentrations. Group mean plasma data for each test article conforms to a multi-exponential profile when plotted against the time post-dosing. The data are fit by a standard two-compartment model with bolus input and first-order rate constants for distribution and elimination phases. The general equation for the best fit of the data for i.v. administration is: c(t)=Ae^{-αt}+Be^{-βt}, where c(t) is the plasma concentration at time t, A and B are intercepts on the Y-axis, and + and β are the apparent first-order rate constants for the distribution and elimination phases, respectively. The α-phase is the initial phase of the clearance and reflects distribution of the protein into all extracellular fluid of the animal, whereas the second or β-phase portion of the decay curve represents true plasma clearance. Methods for fitting such equations are well known in the art. For example, A=D/V(α−k21)/(α−β), B=D/V((β−k21)/(α−β), and α and β (for α>β) are roots of the quadratic equation: r²+(k12+k21+k10)r+k21k10=0 using estimated parameters of V=volume of distribution, k 10=elimination rate, k 12=transfer rate from compartment 1 to compartment 2 and k21=transfer rate from compartment 2 to compartment 1, and D=the administered dose.

[0298] Data analysis: Graphs of concentration versus time profiles are made using KaleidaGraph (KaleidaGraph™ V. 3.09 Copyright 1986-1997. Synergy Software. Reading, Pa.). Values reported as less than reportable (LTR) are not included in the PK analysis and are not represented graphically. Pharmacokinetic parameters are determined by compartmental analysis using WinNonlin software (WinNonlin® Professional V. 3.1 WinNonlin™ Copyright 1998-1999. Pharsight Corporation. Mountain View, Calif.). Pharmacokinetic parameters are computed as described in Ritschel W A and Kearns G L, 1999, IN: Handbook Of Basic Pharmacokinetics Including Clinical Applications, 5th edition, American Pharmaceutical Assoc., Washington, D.C.

[0299] It is expected that the activatable interleukin protein of Example 5 has improved pharmacokinetic parameters such as an increase in elimination half-time as compared to proteins lacking a serum half-life extension element.

### Example 26

### Xenograft Tumor Model

[0300] The activatable interleukin protein of Example 5 is evaluated in a xenograft model.

[0301] Female immune-deficient NOD/scid mice are sub-lethally irradiated (2 Gy) and subcutaneously inoculated with 4×10⁶ Ramos RA1 cells into the right dorsal flank. When tumors reach 100 to 200 mm³, animals are allocated into 3 treatment groups. Groups 2 and 3 (8 animals each) are intraperitoneally injected with 1.5×10⁷ activated human T-cells. Three days later, animals from Group 3 are subsequently treated with a total of 9 intravenous doses of 50 μg activatable interleukin protein of Example 5 (qd×9d). Groups 1 and 2 are only treated with vehicle. Body weight and tumor volume are determined for 30 days.

[0302] It is expected that animals treated with the activatable interleukin protein of Example 5 have a statistically significant delay in tumor growth in comparison to the respective vehicle-treated control group.

[0303] While preferred embodiments of the present invention have been shown and described herein, it will be obvious to those skilled in the art that such embodiments are provided by way of example only. Numerous variations, changes, and substitutions will now occur to those skilled in the art without departing from the invention. It should be understood that various alternatives to the embodiments of the invention described herein may be employed in practicing the invention. It is intended that the following claims define the scope of the invention and that methods and structures within the scope of these claims and their equivalents be covered thereby.

### Example 27

### MC38 Experiments

[0304] The MC38 cell line, a rapidly growing colon adenocarcinoma cell line that expresses MMP9 in vitro, was used. Using this tumor model, the ability of fusion proteins to affect tumor growth was examined.

### Example 27a

### MC38 IL-2POC

### Agents and Treatment:

| | | | Formulation | | | |
|---|---|---|---|---|---|---|
| Gr. | N | Agent | dose | | Route | Schedule |
| 1^{#} | 10 | Vehicle | — | | ip | biwk x 3 |
| 2 | 7 | ACP16 | 700 | μg/animal | ip | biwk x 3 |
| 3 | 7 | ACP16 | 230 | μg/animal | ip | biwk x 3 |
| 4 | 7 | ACP16 | 70 | μg/animal | ip | biwk x 3 |
| 5 | 7 | ACP16 | 55 | ug/animal | ip | biwk x 3 |
| 6 | 7 | ACP16 | 17 | μg/animal | ip | biwk x 3 |
| 7 | 7 | ACP132 | 361 | μg/animal | ip | biwk x 3 |
| 8 | 7 | ACP132 | 119 | μg/animal | ip | biwk x 3 |
| 9 | 7 | ACP132 | 36 | μg/animal | ip | biwk x 3 |
| 10 | 7 | ACP132 | 28 | μg/animal | ip | biwk x 3 |
| 11 | 7 | ACP132 | 9 | μg/animal | ip | biwk x 3 |
| 12 | 7 | ACP21 | 540 | μg/animal | ip | biwk x 3 |
| 13 | 7 | ACP21 | 177 | μg/animal | ip | biwk x 3 |
| 14 | 7 | ACP21 | 54 | μg/animal | ip | biwk x 3 |
| 15 | 7 | ACP21 | 42 | μg/animal | ip | biwk x 3 |
| 16 | 7 | ACP21 | 13 | μg/animal | ip | biwk x 3 |
| # | −ControlGroup | | | | | |

### Procedures:

[0306] Mice were anaesthetized with isoflurane for implant of cells to reduce the ulcerations. 308 CR female C57BL/6 mice were set up with 5×10⁵ MC38 tumor cells in 0% Matrigel sc in flank. Cell Injection Volume was 0.1 mL/mouse. Mouse age at start date was 8 to 12 weeks. Pair matches were performed when tumors reach an average size of 100-150 mm³ and begin treatment. Body weights were taken at initiation and then biweekly to the end. Caliper measurements were taken biweekly to the end. Any adverse reactions were to be reported immediately. Any individual animal with a single observation of >than 30% body weight loss or three consecutive measurements of >25% body weight loss was euthanized. Any group with a mean body weight loss of >20% or >10% mortality stopped dosing; the group was not euthanized and recovery is allowed. Within a group with >20% weight loss, individuals hitting the individual body weight loss endpoint were euthanized. If the group treatment related body weight loss is recovered to within 10% of the original weights, dosing resumed at a lower dose or less frequent dosing schedule. Exceptions to non-treatment body weight % recovery were allowed on a case-by-case basis. Endpoint was tumor growth delay (TGD). Animals were monitored individually. The endpoint of the experiment was a tumor volume of 1500 mm³ or 45 days, whichever comes first. Responders were followed longer. When the endpoint was reached, the animals are to be euthanized.

[0307] Results are shown in FIG. 35.

### Example 27b

### MC38 IL-2 POC. Treatment with ACP16, ACP124 and ACP130

### Agents and Treatment:

| | | | Formulation | | | |
|---|---|---|---|---|---|---|
| Gr. | N | Agent | dose | | Route | Schedule |
| 1^{#} | 12 | Vehicle | — | | ip | biwk x 2 |
| 2 | 8 | ACP16 | 4.4 | μg/animal | ip | biwk x 2 |
| 3 | 8 | ACP16 | 17 | μg/animal | ip | biwk x 2 |
| 4 | 8 | ACP16 | 70 | μg/animal | ip | biwk x 2 |
| 5 | 8 | ACP16 | 232 | μg/animal | ip | biwk x 2 |
| 6 | 8 | ACP130 | 19 | μg/animal | ip | biwk x 2 |
| 7 | 8 | ACP130 | 45 | μg/animal | ip | biwk x 2 |
| 8 | 8 | ACP130 | 180 | μg/animal | ip | biwk x 2 |
| 9 | 8 | ACP130 | 600 | μg/animal | ip | biwk x 1 |
| 12 | 8 | ACP124 | 17 | μg/animal | ip | biwk x 2 |
| 13 | 8 | ACP124 | 70 | μg/animal | ip | biwk x 2 |
| 14 | 8 | ACP124 | 230 | μg/animal | ip | biwk x 2 |
| 15 | 8 | ACP124 | 700 | μg/animal | ip | biwk x 2 |
| 16 | 8 | IL-2- | 12 | μg/animal | ip | bid x 5 then 2-day pause then |
| | | WTI | | | | bid x 5 then 2-day pause |
| 17 | 8 | IL-2- | 36 | μg/animal | ip | bid x 5 then 2-day pause then |
| | | WTI | | | | bid x 5 then 2-day pause |
| # | −Control | | | | | |
| | Group | | | | | |

### Procedures:

[0309] Mice were anaesthetized with isoflurane for implant of cells to reduce the ulcerations. 308 CR female C57BL/6 mice were set up with 5×10⁵ MC38 tumor cells in 0% Matrigel sc in flank. Cell Injection Volume was 0.1 mL/mouse. Mouse age at start date was 8 to 12 weeks.Pair matches were performed when tumors reach an average size of 100-150 mm³ and begin treatment. Body weights were taken at initiation and then biweekly to the end. Caliper measurements were taken biweekly to the end. Any adverse reactions were to be reported immediately. Any individual animal with a single observation of >than 30% body weight loss or three consecutive measurements of >25% body weight loss was euthanized. Any group with a mean body weight loss of >20% or >10% mortality stopped dosing; the group was not euthanized and recovery is allowed. Within a group with >20% weight loss, individuals hitting the individual body weight loss endpoint were euthanized. If the group treatment related body weight loss is recovered to within 10% of the original weights, dosing resumed at a lower dose or less frequent dosing schedule. Exceptions to non-treatment body weight % recovery were allowed on a case-by-case basis. Endpoint was tumor growth delay (TGD). Animals were monitored individually. The endpoint of the experiment was a tumor volume of 1500 mm³ or 45 days, whichever comes first. Responders were followed longer. When the endpoint was reached, the animals are to be euthanized.

[0310] Results are shown in FIGS. 31A-31C and FIGS. 32B-32C. Survival curves are shown in FIGS. 34A-34D.

### Example 27c

### MC38 IFNa and IL-12

### Agents and Treatment:

| | | | Formulation | | | |
|---|---|---|---|---|---|---|
| Gr. | N | Agent | dose | | Route | Schedule |
| 1^{#} | 12 | Vehicle | — | | ip | biwk x 3 |
| 2 | 8 | ACP11 | 17.5 | μg/animal | ip | biwk x 3 |
| 3 | 8 | ACP11 | 175 | μg/animal | ip | biwk x 3 |
| 4 | 8 | ACP11 | 525 | μg/animal | ip | biwk x 3 |
| 5 | 8 | ACP31 | 33 | μg/animal | ip | biwk x 3 |
| 6 | 8 | ACP31 | 110 | μg/animal | ip | biwk x 3 |
| 7 | 8 | ACP31 | 330 | μg/animal | ip | biwk x 3 |
| 8 | 8 | ACP131 | 1 | μg/animal | ip | bid x 5 then 2-day pause then bid x 5 then 2- |
| | | | | | | day pause |
| 9 | 8 | ACP131 | 10 | μg/animal | ip | bid x 5 then 2-day pause then bid x 5 then 2- |
| | | | | | | day pause |
| 10 | 8 | ACP131 | 30 | μg/animal | ip | bid x 5 then 2-day pause then bid x 5 then 2- |
| | | | | | | day pause |
| 11 | 8 | mIFNa1-WTI | 1 | μg/animal | ip | bid x 5 then 2-day pause then bid x 5 then 2- |
| | | | | | | day pause |
| 12 | 8 | mIFNa1-WTI | 10 | μg/animal | ip | bid x 5 then 2-day pause then bid x 5 then 2- |
| | | | | | | day pause |
| 13 | 8 | IL-12-HM-WTI | 2 | μg/animal | ip | bid x 5 then 2-day pause then bid x 5 then 2- |
| | | | | | | day pause |
| 14 | 8 | IL-12-HM-WTI | 10 | μg/animal | ip | bid x 5 then 2-day pause then bid x 5 then 2- |
| | | | | | | day pause |
| 15 | 8 | ACP131 | 5 | μg/animal | itu | bid x 5 then 2-day pause then bid x 5 then 2- |
| | | | | | | day pause |
| # | −Control | | | | | |
| | Group | | | | | |

[0312] Procedures:

[0313] Mice were anaesthetized with isoflurane for implant of cells to reduce the ulcerations. 308 CR female C57BL/6 mice were set up with 5×10⁵ MC38 tumor cells in 0% Matrigel sc in flank. Cell Injection Volume was 0.1 mL/mouse. Mouse age at start date was 8 to 12 weeks.Pair matches were performed when tumors reach an average size of 100-150 mm³ and begin treatment. Body weights were taken at initiation and then biweekly to the end. Caliper measurements were taken biweekly to the end. Any adverse reactions were to be reported immediately. Any individual animal with a single observation of >than 30% body weight loss or three consecutive measurements of >25% body weight loss was euthanized. Any group with a mean body weight loss of >20% or >10% mortality stopped dosing; the group was not euthanized and recovery is allowed. Within a group with >20% weight loss, individuals hitting the individual body weight loss endpoint were euthanized. If the group treatment related body weight loss is recovered to within 10% of the original weights, dosing resumed at a lower dose or less frequent dosing schedule. Exceptions to non-treatment body weight % recovery were allowed on a case-by-case basis. Endpoint was tumor growth delay (TGD). Animals were monitored individually. The endpoint of the experiment was a tumor volume of 1500 mm³ or 45 days, whichever comes first. Responders were followed longer. When the endpoint was reached, the animals are to be euthanized. Results are show in in FIGS. 29A-29B, and 30A-30F.

### Example 27d

### Treatment with ACP16, ACP132, and ACP21

### Agents and Treatment:

| | | | Formulation | | | |
|---|---|---|---|---|---|---|
| Gr. | N | Agent | dose | | Route | Schedule |
| 1^{#} | 10 | Vehicle | — | | ip | biwk x 2 |
| 2 | 7 | ACP16 | 17 | μg/animal | ip | biwk x 2 |
| 3 | 7 | ACP16 | 55 | μg/animal | ip | biwk x 2 |
| 4 | 7 | ACP16 | 70 | μg/animal | ip | biwk x 2 |
| 5 | 7 | ACP16 | 230 | μg/animal | ip | biwk x 2 |
| 6 | 7 | ACP132 | 9 | μg/animal | ip | biwk x 2 |
| 7 | 7 | ACP132 | 28 | μg/animal | ip | biwk x 1 |
| 8 | 7 | ACP132 | 36 | μg/animal | ip | biwk x 1 |
| 9 | 7 | ACP132 | 119 | μg/animal | ip | biwk x 1 |
| 10 | 7 | ACP21 | 13 | μg/animal | ip | biwk x 2 |
| 11 | 7 | ACP21 | 42 | μg/animal | ip | biwk x 2 |
| 12 | 7 | ACP21 | 54 | μg/animal | ip | biwk x 2 |
| 13 | 7 | ACP21 | 177 | μg/animal | ip | biwk x 2 |

### Procedures:

[0315] Mice were anaesthetized with isoflurane for implant of cells to reduce the ulcerations. CR female C57BL/6 mice were set up with 5×10⁵ MC38 tumor cells in 0% Matrigel sc in flank. Cell Injection Volume was 0.1 mL/mouse. Mouse age at start date was 8 to 12 weeks.Pair matches were performed when tumors reach an average size of 100-150 mm³ and begin treatment. ACP16 was dosed at 17, 55, 70, or 230 μg/animal; ACP132 was dosed at 9, 28, 36, or 119 ug/animal; ACP21 was dosed at 13, 42, 54, or 177 μg/animal. Body weights were taken at initiation and then biweekly to the end. Caliper measurements were taken biweekly to the end. Any adverse reactions were to be reported immediately. Any individual animal with a single observation of >than 30% body weight loss or three consecutive measurements of >25% body weight loss was euthanized. Any group with a mean body weight loss of >20% or >10% mortality stopped dosing; the group was not euthanized and recovery is allowed. Within a group with >20% weight loss, individuals hitting the individual body weight loss endpoint were euthanized. If the group treatment related body weight loss is recovered to within 10% of the original weights, dosing resumed at a lower dose or less frequent dosing schedule. Exceptions to non-treatment body weight % recovery were allowed on a case-by-case basis. Endpoint was tumor growth delay (TGD). Animals were monitored individually. The endpoint of the experiment was a tumor volume of 1500 mm³ or 45 days, whichever comes first. Responders were followed longer. When the endpoint was reached, the animals are to be euthanized. Results are shown in FIG. 35.

### Example 27e

### MC38 Rechallenge

[0316] Cured mice (ACP16-treated) from Example 27b were rechallenged with tumor implantation to determine whether anti-tumor memory had been established from the initial treatments.

### Agents and Treatment:

| | | | Formulation | | | |
|---|---|---|---|---|---|---|
| Gr. | N | Agent | dose | | Route | Schedule |
| 1^{#} | 33 | No | — | | — | — |
| | | Treatment | | | | |
| 2 | 7 | ACP16 | 70 | μg/animal | ip | (ACP16 biwkx2) |
| 3 | 8 | ACP16 | 232 | μg/animal | ip | (ACP16 biwkx2) |
| 5 | 5 | IL-2-WTI | 12 | μg/animal | ip | (IL-2-WTI bid x 5 then |
| | | | | | | 2-day pause then bid x |
| | | | | | | 5 then 2-day pause) |
| 6 | 7 | IL-2-WTI | 36 | μg/animal | ip | (IL-2-WTI bid x 5 then |
| | | | | | | 2-day pause then bid x |
| | | | | | | 5 then 2-day pause) |
| # | −Control | | | | | |
| | Group | | | | | |

### Procedures:

[0318] Mice were anaesthetized with isoflurane for implant of cells to reduce the ulcerations. This portion of the study began on the day of implant (Day 1). Group 1 consisted of 33 CR female C57BL/6 mice set up with 5×10⁵ MC38 tumor cells in 0% Matrigel subcutaneously in the flank. Groups 2-6 consisted of 33 CR female C57BL/6 mice set up with 5×10⁵ MC38 tumor cells in 0% Matrigel sc in the left flank. The tumors from the previous MC38 experiment (Example 27b) were implanted in the right flank of each animal. Cell Injection Volume was 0.1 mL/mouse. Age of control mice at initiation was14 to 17 weeks. These mice were age matched to mice from the previous MC38 experiment (Example 27b). No dosing of active agent occurred during rechallenge. Body Weights were take biweekly until end, as were caliper measurements. Any adverse reactions or death were reported immediately. Any individual animal with a single observation of >than 30% body weight loss or three consecutive measurements of >25% body weight loss was euthanized. Endpoint was tumor growth delay (TGD). Animals were monitored individually. The endpoint of the experiment was a tumor volume of 1000 mm³ or 45 days, whichever comes first. Responders were followed longer when possible. When the endpoint is reached, the animals were euthanized. Results are shown in FIG. 33.

### Example 27f

### Treatment with ACP10, ACP11

### Agents and Treatment:

| | | | Formulation | | | |
|---|---|---|---|---|---|---|
| Gr. | N | Agent | dose | | Route | Schedule |
| 1^{#} | 12 | Vehicle | — | | ip | biwk x 2 |
| 2 | 8 | ACP11 | 175 | μg/animal | ip | biwk x 2 |
| 3 | 8 | ACP11 | 300 | μg/animal | ip | biwk x 2 |
| 4 | 8 | ACP10 | 5 | μg/animal | ip | biwk x 2 |
| 5 | 8 | ACP10 | 10 | μg/animal | ip | biwk x 2 |
| 6 | 8 | ACP10 | 43 | μg/animal | ip | biwk x 2 |
| 7 | 8 | ACP10 | 43 | μg/animal | ip | qwk x 2 |
| 8 | 8 | ACP10 | 172 | μg/animal | ip | biwk x 2 |
| 9 | 8 | IL-I2- | 5 | μg/animal | ip | bid for 5 days first day 1 dose then |
| | | HM-WTI | | | | 2-day pause then bid for 5 days first |
| | | | | | | day 1 dose then 2-day pause |
| 10 | 8 | IL-12- | 20 | μg/animal | ip | bid for 5 days first day 1 dose then |
| | | HM-WTI | | | | 2-day pause then bid for 5 days first |
| | | | | | | day 1 dose then 2-day pause |

### Procedures:

[0320] Mice were anaesthetized with isoflurane for implant of cells to reduce the ulcerations. CR female C57BL/6 mice were set up with 5×10⁵ MC38 tumor cells in 0% Matrigel sc in flank. Cell Injection Volume was 0.1 mL/mouse. Mouse age at start date was 8 to 12 weeks. Pair matches were performed when tumors reach an average size of 100-150 mm³ and begin treatment. ACP11 was dosed at 175 or 300 μg/animal; ACP10 was dosed at 5, 10, 43, or 172 ug/animal; IL-12-HM-WTI was dosed at 5 or 20 ug/animal. Body weights were taken at initiation and then biweekly to the end. Caliper measurements were taken biweekly to the end. Any adverse reactions were to be reported immediately. Any individual animal with a single observation of >than 30% body weight loss or three consecutive measurements of >25% body weight loss was euthanized. Any group with a mean body weight loss of >20% or >10% mortality stopped dosing; the group was not euthanized and recovery is allowed. Within a group with >20% weight loss, individuals hitting the individual body weight loss endpoint were euthanized. If the group treatment related body weight loss is recovered to within 10% of the original weights, dosing resumed at a lower dose or less frequent dosing schedule. Exceptions to non-treatment body weight % recovery were allowed on a case-by-case basis. Endpoint was tumor growth delay (TGD). Animals were monitored individually. The endpoint of the experiment was a tumor volume of 1500 mm³ or 45 days, whichever comes first. Responders were followed longer. When the endpoint was reached, the animals are to be euthanized. Results are shown in FIG. 45 and FIGS. 46A-46D.

### Example 27g

### Treatment with ACP16, APC153, ACP155, ACP156 and ACP292

Agents and Treatment:

| | | | Formulation | | | |
|---|---|---|---|---|---|---|
| Gr. | N | Agent | dose | | Route | Schedule |
| 1^{#} | 12 | Vehicle | — | | ip | biwk x 2 |
| 2 | 8 | ACP16 | 17 | μg/animal | ip | biwk x 2 |
| 3 | 8 | ACP16 | 55 | μg/animal | ip | biwk x 2 |
| 4 | 8 | ACP16 | 230 | μg/animal | ip | biwk x 2 |
| 5 | 8 | ACP155 | 55 | μg/animal | ip | biwk x 2 |
| 6 | 8 | ACP155 | 230 | μg/animal | ip | biwk x 2 |
| 7 | 8 | ACP153 | 55 | μg/animal | ip | biwk x 2 |
| 8 | 8 | ACP153 | 230 | μg/animal | ip | biwk x 2 |
| 9 | 8 | ACP156 | 55 | μg/animal | ip | biwk x 2 |
| 10 | 8 | ACP156 | 230 | μg/animal | ip | biwk x 2 |
| 11 | 8 | ACP292 | 45 | μg/animal | ip | biwk x 2 |
| 12 | 8 | ACP292 | 186 | μg/animal | ip | biwk x 2 |

### Procedures:

[0322] Mice were anaesthetized with isoflurane for implant of cells to reduce the ulcerations. CR female C57BL/6 mice were set up with 5×10⁵ MC38 tumor cells in 0% Matrigel sc in flank. Cell Injection Volume was 0.1 mL/mouse. Mouse age at start date was 8 to 12 weeks. Pair matches were performed when tumors reach an average size of 100-150 mm³ and begin treatment. ACP16 was dosed at 17, 55 or 230 μg/animal; ACP153, ACP155 and ACP156 were dosed at 55 or 230 μg/animal; ACP292 was dosed at 45 or 186 μg/animal. Body weights were taken at initiation and then biweekly to the end. Caliper measurements were taken biweekly to the end. Any adverse reactions were to be reported immediately. Any individual animal with a single observation of >than 30% body weight loss or three consecutive measurements of >25% body weight loss was euthanized. Any group with a mean body weight loss of >20% or >10% mortality stopped dosing; the group was not euthanized and recovery is allowed. Within a group with >20% weight loss, individuals hitting the individual body weight loss endpoint were euthanized. If the group treatment related body weight loss is recovered to within 10% of the original weights, dosing resumed at a lower dose or less frequent dosing schedule. Exceptions to non-treatment body weight % recovery were allowed on a case-by-case basis. Endpoint was tumor growth delay (TGD). Animals were monitored individually. The endpoint of the experiment was a tumor volume of 1500 mm³ or 45 days, whichever comes first. Responders were followed longer. When the endpoint was reached, the animals are to be euthanized. Results are shown in FIGS. 49A-491.

### Example 27h

### Treatment with ACP16, APC302 and ACP314

Agents and Treatment:

| | | | Formulation | | | |
|---|---|---|---|---|---|---|
| Gr. | N | Agent | dose | | Route | Schedule |
| 1^{#} | 12 | Vehicle | — | | ip | biwk x 2 |
| 2 | 9 | ACP16 | 55 | μg/animal | ip | biwk x 2 |
| 3 | 9 | ACP16 | 230 | μg/animal | ip | biwk x 2 |
| 4 | 9 | ACP302 | 33 | μg/animal | ip | biwk x 2 |
| 5 | 9 | ACP302 | 106 | μg/animal | ip | biwk x 2 |
| 6 | 9 | ACP302 | 442 | μg/animal | ip | biwk x 2 |
| 7 | 9 | ACP302 | 1,344 | μg/animal | ip | biwk x 2 |
| 8 | 9 | ACP314 | 21 | μg/animal | ip | biwk x 2 |
| 9 | 9 | ACP314 | 68 | μg/animal | ip | biwk x 2 |
| 10 | 9 | ACP314 | 283 | μg/animal | ip | biwk x 2 |
| 11 | 9 | ACP314 | 861 | μg/animal | ip | biwk x 2 |

### Procedures:

[0324] Mice were anaesthetized with isoflurane for implant of cells to reduce the ulcerations. CR female C57BL/6 mice were set up with 5×10⁵ MC38 tumor cells in 0% Matrigel sc in flank. Cell Injection Volume was 0.1 mL/mouse. Mouse age at start date was 8 to 12 weeks. Pair matches were performed when tumors reach an average size of 100-150 mm³ and begin treatment. ACP16 was dosed at 55 or 230 μg/animal; ACP302 was dosed at 33, 106, 442 or 1344 ug/animal; ACP314 was dosed at 21,68, 283 or 861 μg/animal. Body weights were taken at initiation and then biweekly to the end. Caliper measurements were taken biweekly to the end. Any adverse reactions were to be reported immediately. Any individual animal with a single observation of >than 30% body weight loss or three consecutive measurements of >25% body weight loss was euthanized. Any group with a mean body weight loss of >20% or >10% mortality stopped dosing; the group was not euthanized and recovery is allowed. Within a group with >20% weight loss, individuals hitting the individual body weight loss endpoint were euthanized. If the group treatment related body weight loss is recovered to within 10% of the original weights, dosing resumed at a lower dose or less frequent dosing schedule. Exceptions to non-treatment body weight % recovery were allowed on a case-by-case basis. Endpoint was tumor growth delay (TGD). Animals were monitored individually. The endpoint of the experiment was a tumor volume of 1500 mm³ or 45 days, whichever comes first. Responders were followed longer. When the endpoint was reached, the animals are to be euthanized. Results are shown in FIG. 50A and FIG. 50B.

### Example 27i

### Treatment with ACP339

Agents and Treatment:

| Gr. | N | Agent | Formulation dose | | Route | Schedule |
|---|---|---|---|---|---|---|
| 1^{#} | 12 | Vehicle | — | | ip | biwk x 2 |
| 2 | 9 | ACP339 | 55 | μg/animal | ip | biwk x 2 |
| 3 | 9 | ACP339 | 230 | μg/animal | ip | biwk x 2 |
| 4 | 9 | ACP339 | 700 | μg/animal | ip | biwk x 2 |

### Procedures:

[0326] Mice were anaesthetized with isoflurane for implant of cells to reduce the ulcerations. CR female C57BL/6 mice were set up with 5×10⁵ MC38 tumor cells in 0% Matrigel sc in flank. Cell Injection Volume was 0.1 mL/mouse. Mouse age at start date was 8 to 12 weeks. Pair matches were performed when tumors reach an average size of 100-150 mm³ and begin treatment. ACP339 was dosed at 55, 230 or 700 μg/animal. Body weights were taken at initiation and then biweekly to the end. Caliper measurements were taken biweekly to the end. Any adverse reactions were to be reported immediately. Any individual animal with a single observation of >than 30% body weight loss or three consecutive measurements of >25% body weight loss was euthanized. Any group with a mean body weight loss of >20% or >10% mortality stopped dosing; the group was not euthanized and recovery is allowed. Within a group with >20% weight loss, individuals hitting the individual body weight loss endpoint were euthanized. If the group treatment related body weight loss is recovered to within 10% of the original weights, dosing resumed at a lower dose or less frequent dosing schedule. Exceptions to non-treatment body weight % recovery were allowed on a case-by-case basis. Endpoint was tumor growth delay (TGD). Animals were monitored individually. The endpoint of the experiment was a tumor volume of 1500 mm³ or 45 days, whichever comes first. Responders were followed longer. When the endpoint was reached, the animals are to be euthanized. Results are shown in FIGS. 51A-51C.

[0327] Example 28

### CT26 Experiments

[0328] The CT26 cell line, a rapidly growing colon adenocarcinoma cell line that expresses MMP9 in vitro, was used. Using this tumor model, the ability of fusion proteins to affect tumor growth was examined.

[0329] Example 28a

### Treatment with ACP16 Alone or in Combination with Anti-PD1 Antibody

[0330] Agents and Treatment:

| | | | Formulation | | |
|---|---|---|---|---|---|
| Gr. | N | Agent | dose | Route | Schedule |
| 1^{#} | 12 | vehicle 1// | na// | ip//ip | days 1, 4, 8, 11// |
| | | vehicle 2 | na | | days 3, 6, 10, 13 |
| 2 | 10 | vehicle 1// | na// | ip//ip | days 1, 4, 8, 11// |
| | | ACP16 | 70 μg/animal | | days 3, 6, 10, 13 |
| 3 | 10 | vehicle 1// | na// | ip//ip | days 1, 4, 8, 11// |
| | | ACP16 | 232 μg/animal | | days 3, 6, 10, 13 |
| 4 | 10 | vehicle 1// | na// | ip//ip | days 1, 4, 8, 11// |
| | | ACP16 | 500 μg/animal | | days 3, 6, 10, 13 |
| 5 | 10 | anti-PD-1 RMP1-14// | 200 μg/animal// | ip//ip | days 1, 4, 8, 11// |
| | | vehicle 2 | na | | days 3, 6, 10, 13 |
| 6 | 10 | anti-PD-1 RMP1-14// | 200 μg/animal// | ip//ip | days 1, 4, 8, 11// |
| | | ACP16 | 70 μg/animal | | days 3, 6, 10, 13 |
| 7 | 10 | anti-PD-1 RMP1-14// | 200 μg/animal// | ip//ip | days 1, 4, 8, 11// |
| | | ACP16 | 232 μg/animal | | days 3, 6, 10, 13 |
| 8 | 10 | anti-PD-1 RMP1-14// | 200 μg/animal// | ip//ip | days 1, 4, 8, 11// |
| | | ACP 16 | 500 μg/animal | | days 3, 6, 10, 13 |
| 9 | 10 | vehicle 1// | na// | ip//ip | days 1, 4, 8, 11// |
| | | IL-2 | 12 μg/animal | | bid x 5 first day 1 |
| | | | | | dose per week x 2 |
| 10 | 10 | anti-PD-1 RMP1-14// | 200 μg/animal// | ip//ip | days 1, 4, 8, 11// |
| | | IL-2 | 12 μg/animal | | bid x 5 first day 1 |
| | | | | | dose per week x 2 |

### Procedures:

[0331] Mice were anaesthetized with isoflurane for implant of cells to reduce the ulcerations. CR female BALB/c mice were set up with 3×10⁵ CT26 tumor cells in 0% Matrigel sc in flank. Cell Injection Volume was 0.1 mL/mouse. Mouse age at start date was 8 to 12 weeks. Pair matches were performed when tumors reach an average size of 100-150 mm³ and begin treatment. ACP16 was dosed at 70, 230 or 500 μg/animal with or without anti-PD-1 antibody (RMP1-14) at 200 μg/animal. Body weights were taken at initiation and then biweekly to the end. Caliper measurements were taken biweekly to the end. Any adverse reactions were to be reported immediately. Any individual animal with a single observation of >than 30% body weight loss or three consecutive measurements of >25% body weight loss was euthanized. Any group with a mean body weight loss of >20% or >10% mortality stopped dosing; the group was not euthanized and recovery is allowed. Within a group with >20% weight loss, individuals hitting the individual body weight loss endpoint were euthanized. If the group treatment related body weight loss is recovered to within 10% of the original weights, dosing resumed at a lower dose or less frequent dosing schedule. Exceptions to non-treatment body weight % recovery were allowed on a case-by-case basis. Endpoint was tumor growth delay (TGD). Animals were monitored individually. The endpoint of the experiment was a tumor volume of 1500 mm³ or 45 days, whichever comes first. Responders were followed longer. When the endpoint was reached, the animals are to be euthanized. Results are shown in FIGS. 47A-47D and FIGS. 48A-48B.

### Example 29

### Human Tblast Assay

[0332] Pre-stimulated T cells (T-blasts) were used to assess the activity of inducible IL-2 fusion proteins. T-Blasts were induced from human PBMCs with a 3-day incubation with PHA. Tblasts were then plated in suspension at a concentration of 50,000 or 75,000 cells/well in X-VIVO culture media (containing human serum albumin) and stimulated with a dilution series of recombinant IL-2 fusion proteins or human IL-2 for 72 hours at 37° C. and 5% CO₂. Activity of uncleaved and cleaved IL-2 fusion proteins was tested. Cleaved inducible IL-2 was generated by incubation with active MMP9. IL-2 activity was assessed measuring proliferation with CellTiter-Glo.

[0333] Sample fusion protein constructs are detailed in Table 3. In table 3, “L” is an abbreviation of “linker”, and “cleay. link.” is an abbreviation of “cleavable linker”. Other abbreviations “mIFNg” indicates mouse interferon gamma (IFNg); “hAlbumin” indicates human serum albumin (HSA); “mAlbumin” indicates mouse serum albumin.

TABLE 3
CONSTRUCT PERMUTATION TABLE (“6xHis” disclosed as SEQ ID NO: 354)

| Construct | |
|---|---|
| Name | Construct Description |
| ACP01 | (anti-HSA)-(cleav. link.)-mouse IFNg-(cleav. link.)-(anti-HSA)-6xHis |
| ACP02 | (anti-HSA)-(cleav. link.)-mouse IFNg-(cleav. link.)-mouse IFNg-(cleav. link.)-(anti- |
| | HSA)-6xHis |
| ACP03 | (anti-HSA)-(cleav. link.)-mouse IFNg-mouse IFNg-(cleav. link.)-(anti-HSA)-6xHis |
| ACP50 | (anti-EpCAM)-(anti-HSA)-(cleav. link.)-mouse IFNg-mouse IFNg-(cleav. link.)-(anti- |
| | HSA)-6xHis |
| ACP51 | (anti-EpCAM)-Linker-(anti-HSA)-(cleav. link.)-mIFNg-(cleav. link.)-(anti-HSA)- |
| | 6xHis |
| ACP52 | (anti-HSA)-(cleav. link.)-mIFNg-(cleav. link.)-(anti-HSA)-Linker-(anti-EpCAM)- |
| | 6xHis |
| ACP53 | mAlbumin-(cleav. link.)-mIFNg-(cleav. link.)-mAlbumin-6xHis |
| ACP54 | mAlbumin-(cleav. link.)-mIFNg-Linker-mIFNg-(cleav. link.)-mAlbumin-6xHis |
| ACP30 | (anti-HSA)-(cleav. link.)-mouse IFNg-(cleav. link.)-(anti-HSA)-(cleav. link.)-mouse |
| | IFNg-(cleav. link.)-(anti-HSA)-6xHis |
| ACP55 | (anti-HSA)-(cleav. link.)-mouse IFNg-(cleav. link.)-(anti-HSA)-(cleav. link.)-mouse |
| | IFNg-(cleav. link.)-(anti-HSA)-6xHis-C-tag |
| ACP56 | (anti-FOLR1)-Linker-(anti-HSA)-(cleav. link.)-mIFNg-(cleav. link.)-(anti-HSA)-6xHis |
| ACP57 | (anti-HSA)-(cleav. link.)-mIFNg-(cleav. link.)-(anti-HSA)-Linker-(anti-FOLR1)-6xHis |
| ACP58 | (anti-HSA)-(cleav. link.)-mIFNg-(cleav. link.)-mIFNg-(cleav. link.)-(anti-HSA)- |
| | Linker-(anti-EpCAM)-6xHis |
| ACP59 | (anti-FOLR1)-Linker-(anti-HSA)-(cleav. link.)-mIFNg-(cleav. link.)-mIFNg-(cleav. |
| | link.)-(anti-HSA)-6xHis |
| ACP60 | (anti-HSA)-(cleav. link.)-mIFNg-(cleav. link.)-mIFNg-(cleav. link.)-(anti-HSA)- |
| | Linker-(anti-FOLR1)-6xHis |
| ACP61 | (anti-HSA)-(cleav. link.)-mIFNg-(cleav. link.)-mIFNg-(cleav. link.)-(anti-HSA)- |
| | Linker-FN(CGS-2)-6xHis |
| ACP63 | anti-FN CGS-2 scFv (Vh/Vl)-6xHis |
| ACP69 | (anti-HSA)-(cleav. link.)-mouse IFNg-(cleav. link.)-(anti-HSA)-(cleav. link.)-mouse |
| | IFNg |
| ACP70 | mouse IFNg-(cleav. link.)-(anti-HSA)-(cleav. link.)-mouse IFNg-(cleav. link.)-(anti- |
| | HSA) |
| ACP71 | mouse IFNg-(cleav. link.)-mAlbumin-(cleav. link.)-mouse IFNg-(cleav. link.)- |
| | mAlbumin |
| ACP72 | mAlbumin-(cleav. link.)-mouse IFNg-(cleav. link.)-mAlbumin-(cleav. link.)-mouse |
| | IFNg |
| ACP73 | mAlbumin-(cleav. link.)-mouse IFNg-(cleav. link.)-mAlbumin-(cleav. link.)-mouse |
| | IFNg-(cleav. link.)-mAlbumin |
| ACP74 | mAlbumin-(cleav. link.)-mouse IFNg-(cleav. link.)-5mer linker-mAlbumin-5mer |
| | linker-(cleav. link.)-mouse IFNg-(cleav. link.)-mAlbumin |
| ACP75 | mAlbumin-(cleav. link.)-mouse IFNg-(cleav. link.)-10mer linker-mAlbumin-10mer |
| | linker-(cleav. link.)-mouse IFNg-(cleav. link.)-mAlbumin |
| ACP78 | (anti-HSA)-Linker-mouse_IFNg-Linker-(anti-HSA)-Linker-mouse_IFNg-Linker-(anti- |
| | HSA)_(non-cleavable_control) |
| ACP134 | Anti-HSA-(cleav. link.)-mouse_IFNg-(cleav. link.)-anti-HSA-(cleav. link.)- |
| | mouse_IFNg-(cleav. link.)-anti-HSA-L-anti-FOLR1 |
| ACP 135 | Anti-FOLR1-L-HSA-(cleav. link.)-mouse_IFNg-(cleav. link.)-HSA-(cleav. link.)- |
| | mouse_IFNg-(cleav. link.)-HSA |
| ACP04 | human p40-murine p35-6xHis |
| ACP05 | human p40-human p35-6xHis |
| ACP34 | mouse p35-(cleav. link.)-mouse p40-6xHis |
| ACP35 | mouse p35-GS-(cleav. link.)-GS-mouse p40-6xHis |
| ACP36 | (anti-HSA)-(Cleav. Linker)-mouse p40-mouse p35-(Cleav. Linker)-(anti-HSA)-6xHis |
| ACP37 | (anti-EpCAM)-(anti-HSA)-(Cleav. Linker)-mouse p40-mouse p35-(Cleav. Linker)- |
| | (anti-HSA)-6xHis |
| ACP79 | (anti-EpCAM)-Linker-(anti-HSA)-(cleav. link.)-mIL12-(cleav. link.)-(Anti-HSA)- |
| | 6xHis |
| ACP80 | (anti-HSA)-(cleav. link.)-mIL12-(cleav. link.)-(anti-HSA)-Linker-(anti-EpCAM)- |
| | 6xHis |
| ACP06 | Blocker12-Linker-(cleav. link.)-human p40-Linker-mouse p35-(cleav. link.)-(anti- |
| | HSA)-6xHis |
| ACP07 | Blocker12-Linker-(cleav. link.)-human p40-Linker-mouse p35-(cleav. link.)-(anti- |
| | HSA)-Linker-(anti-FOLR1)-6xHis |
| ACP08 | (anti-FOLR1)-Linker-Blocker12-Linker-(cleav. link.)-human p40-Linker-mouse p35- |
| | (cleav. link.)-(anti-HSA)-6xHis |
| ACP09 | (anti-HSA)-Linker-Blocker12-Linker-(cleav. link.)-human p40-Linker-mouse p35- |
| | 6xHis |
| ACP10 | (anti-HSA)-(cleav. link.)-human p40-L-mouse p35-(cleav. link.)-Linker-Blocker12-6xHis |
| ACP11 | Human_p40-Linker-mouse_p35-(cleav. link.)-Linker-Blocker12-Linker-(anti-HSA)-6xHis |
| ACP91 | human_p40-Linker-mouse_p35-Linker-Linker-Blocker-Linker-(anti-HSA)_(non- |
| | cleavable control) |
| ACP136 | human p40-L-mouse p35-(cleav. link.)-Blocker |
| ACP138 | human_p40-L-mouse_p35-(cleav. link.)-Blocker-L-(anti-HSA)-L-FOLR1 |
| ACP139 | Anti-FOLR1-L-human_p40-L-mouse_p35-(cleav. link.)-Blocker12-L-(anti-HSA) |
| ACP140 | Anti-FOLR1-(cleav. link.)-human_p40-L-mouse_p35-(cleav. link.)-Blocker12-L-(anti-HSA) |
| ACP12 | (anti-EpCAM)-IL2-(cleav. link.)-(anti-HSA)-blocker2-6xHis |
| ACP13 | (anti-EpCAM)-Blocker2-(anti-HSA)-(cleav. link.)-IL2-6xHis |
| ACP14 | Blocker2-Linker-(cleav. link.)-IL2- (cleav. link.)-(anti-HSA)-6xHis |
| ACP15 | Blocker2-Linker-(anti-HSA)-Linker-(cleav. link.)- IL2 -6xHis |
| ACP16 | IL2-(cleav. link.)-(anti-HSA)-Linker-(cleav. link.)-Blocker2-6xHis |
| ACP17 | (anti-EpCAM)-Linker-IL2-(cleav. link.)-(anti-HSA)-Linker-(cleav. link.)-Blocker2-6xHis |
| ACP18 | (anti-EpCAM)-Linker-IL2-(clcav. link.)-(anti-HSA)-Linker-vh(cleav. link.)vl-6xHis |
| ACP19 | IL2-(cleav. link.)-Linker-Blocker2-Linker-(anti-HSA)-Linker-(anti-EpCAM) -6xHis |
| ACP20 | IL2-(cleav. link.)-Blocker2-6xHis |
| ACP21 | IL2-(cleav. link.)-Linker-Blocker2-6xHis |
| ACP22 | IL2-(cleav. link.)-Linker-blocker-(cleav. link.)-(anti-HSA)-Linker-(anti-EpCAM)-6xHis |
| ACP23 | (anti-FOLR1)-(cleav. link.)-Blocker2-Linker-(cleav. link.)-(anti-HSA)-(cleav. link.)-IL2-6xHis |
| ACP24 | (Blocker2)-(cleav. link.)-(IL2)-6xHis |
| ACP25 | Blocker2-Linker-(cleav. link.)-IL2-6xHis |
| ACP26 | (anti-EpCAM)-Linker-IL2-(cleav. link.)-(anti-HSA)-Linker-blocker(NARA1 Vh/Vl) |
| ACP27 | (anti-EpCAM)-Linker-IL2-(cleav. link.)-(anti-HSA)-Linker-blocker(NARA1 Vl/Vh) |
| ACP28 | IL2-(cleav. link.)-Linker-Blocker2-(NARA1 Vh/Vl)-Linker-(anti-HSA)-Linker-(anti-EpCAM) |
| ACP29 | IL2-(cleav. link.)-Linker-Blocker2-(NARA1 Vl/Vh)-Linker-(anti-HSA)-Linker-(anti-EpCAM) |
| ACP38 | IL2-(cleav. link.)-blocker-(anti-HSA)-(anti-EpCAM)-6xHis |
| ACP39 | (anti-EpCAM)-(cleav. link.)-(anti-HSA)-(cleav. link.)-Blocker2-(cleav. link.)-IL-2-6xHis |
| ACP40 | CD25ecd-Linker-(cleav. link.)-IL2-6xHis |
| ACP41 | IL2-(cleav. link.)-Linker-CD25ecd-6xHis |
| ACP42 | (anti-HSA)-Linker-CD25ecd-Linker-(cleav. link.)-IL2-6xHis |
| ACP43 | IL2-(cleav. link.)-Linker-CD25ecd-Linker-(anti-HSA)-6xHis |
| ACP44 | IL2-(cleav. link.)-Linker-CD25ecd-(cleav. link.)-(anti-HSA)-6xHis |
| ACP45 | (anti-HSA)-(cleav. link.)-Blocker2-Linker-(cleav. link.)-IL2-6xHis |
| ACP46 | IL2-(cleav. link.)-linkerL-vh(cleav. link.)vl-Linker-(anti-HSA)-L-(anti-EpCAM)-6xHis |
| ACP47 | (anti-EpCAM)-Linker-IL2-(Cleavable Linker)-(anti-HSA)-Linker-Blocker2-6xHis |
| ACP48 | IL2-(cleav. link.)-Blocker2-Linker-(anti-HSA)-6xHis |
| ACP49 | IL2-(cleav. link.)-Linker-Blocker2-Linker-(anti-HSA)-6xHis |
| ACP92 | (anti-HSA)-(16mer Cleav. Link.)-IL2-(16mer Cleav. Link.)-(anti-HSA)-6XHis |
| ACP93 | (anti-EpCAM)-(anti-HSA)-(anti-EpCAM)-Blocker2-(cleav. link.)-IL2-6xHis |
| ACP94 | (anti-EpCAM)-(anti-HSA)-Blocker2-(cleav. link.)-IL2-6xHis |
| ACP95 | (anti-EpCAM)-(anti-HSA)-(cleav. link.)-IL2-6xHis |
| ACP96 | (anti-EpCAM)-(16mer cleav. link.)-IL2-(16mer cleav. link.)-(anti-HSA) |
| ACP97 | (anti-EpCAM)-(anti-HSA)-(cleav. link.)-IL2-(cleav. link.)-(anti-HSA)-6xHis |
| ACP99 | (anti-EpCAM)-Linker-IL2-(cleav. link.)-(anti-HSA)-6xHis |
| ACP100 | (anti-EpCAM)-Linker-IL2-6xHis |
| ACP101 | IL2-(cleav. link.)-(anti-HSA)-6xHis |
| ACP102 | (anti-EpCAM)-(cleav. link.)-IL2-(cleav. link.)-(anti-HSA)-Linker-blocker-6xHis |
| ACP103 | IL2-(cleav. link.)-Linker-Blocker2-Linker-(anti-HSA)-Linker-(antiI-FOLR1)-6xHis |
| ACP104 | (anti-FOLR1)-IL2-(cleav. link.)-(anti-HSA)-Linker-Blocker2-6xHis |
| ACP105 | Blocker2-Linker-(cleav. link.)-IL2-(cleav. link.)-(anti-HSA)-Linker-(anti-FOLR1)-6xHis |
| ACP106 | (anti-FOLR1)-Linker-(anti-HSA)-(cleav. link.)-blocker-Linker-(cleav. link.)-IL2 -6xHis |
| ACP107 | Blocker2-Linker-(anti-HSA)-(cleav. link.)-IL2-Linker-(anti-FOLR1)-6xHis |
| ACP108 | (anti-EpCAM)-IL2-(Dually cleav. link.)-(anti-HSA)-Linker-blocker-6xHis |
| ACP117 | anti-FN CGS-2 scFv (Vh/Vl)-6xHis |
| ACP118 | NARA1 Vh/Vl non-cleavable |
| ACP119 | NARA1 Vh/Vl cleavable |
| ACP120 | NARA1 Vl/Vh non-cleavable |
| ACP121 | NARA1 Vl/Vh cleavable |
| ACP124 | IL2-Linker-(anti-HSA)-Linker-Linker-blocker_(non-cleavable_control) |
| ACP132 | IL2-L-HSA |
| ACP141 | IL2-L-human_Albumin |
| ACP142 | IL2-(cleav. link.)-human_Albumin |
| ACP144 | IL2-(cleav. link.)-HSA-(cleav.-link.)blocker-L-(anti-FOLR1) |
| ACP145 | Anti-FOLR1-L-IL2-(cleav. link.)-HSA-Linker-(cleav. link.)-blocker2 |
| ACP146 | Anti-FOLR1-(cleav. link)-IL2-(cleav. link.)-HSA-Linker-(cleav. link.)-blocker2 |
| ACP133 | IL2-6x His |
| ACP147 | IL2-(cleav. Linker)-(anti-HSA)-Linker-(cleav. link.)-blocker2-L-(anti-EpCAM) |
| ACP148 | (anti-EpCAM)-L-IL2-(cleav. link.)-(anti-HSA)-L-(cleav. Linker)-blocker2 |
| ACP149 | (anti-EpCAM)-(cleav. link.)-IL2-(cleav. Linker)-(anti-HSA)-L-(cleav. Linker)-blocker2 |
| ACP31 | (anti-HSA)-(cleav. link.)-mIFNa1-(cleav. link.)-(anti-HSA) |
| ACP32 | (anti-HSA)-(cleav. link.)-mIFNa1(N + C trunc)-(cleav. link.)-(anti-HSA) |
| ACP33 | (anti-HSA)-(cleav. link.)-mIFNa1(C trunc)-(cleav. link.)-(anti-HSA) |
| ACP131 | mIFNa1 |
| ACP125 | Anti-HSA-(cleav. link.)-mIFNa1 |
| ACP126 | mIFNa1-(cleav. link.)-(anti-HSA) |
| ACP127 | Mouse_Albumin-(cleav. Link.)-mIFNa1-(cleav link)-mouse_Albumin |
| ACP128 | Mouse_Albumin-(cleav. link.)-mIFNa1 |
| ACP129 | mIFNa1-(cleav. link.)-mAlb |
| ACP150 | (Anti-FOLR1)-L-(anti-HSA)-(cleav. Link.)-mIFNa1-(cleav. Link.)-(anti-HSA) |
| ACP151 | Anti-FOLR1-L-(anti-HSA)-(cleav. Link.)-mIFNa1-(cleav. Link.)-(anti-HSA)-L-(anti-FLOR1) |
| ACP152 | (anti-HSA)-L-mIFNa1-L-(anti-HSA)_(non-cleavable_control) |
| ACP153 | IL2-(cleav. link.)-(anti-HSA)-linker(cleav. link.)-blocker2 |
| ACP154 | IL2-(cleav. link.)-(anti-HSA)-linker(cleav. link.)-blocker2 |
| ACP155 | IL2-(cleav. link.)-(anti-HSA)-linker(cleav. link.)-blocker2 |
| ACP156 | IL2-(cleav. link.)-(anti-HSA)-linker(cleav. link.)-blocker2 |
| ACP157 | IL2-(cleav. link.)-(anti-HSA)-linker(cleav. link.)-blocker2 |
| ACP200 | mAlb(D3)-X-mouse-IFNa-X-mAlb(D3)_(X = MMP9-M) |
| ACP201 | mAlb(D1-L-D3)-X-mouse-IFNa-X-mAlb(D1-L-D3)_(X = MMP9-M) |
| ACP202 | HSA-X-mIFNa1-X-HSA_(X = MMP9-M + 17aa) |
| ACP203 | HSA-X-mIFNa1-X-HSA_(X = MMP14-1) |
| ACP204 | HSA-X-mIFNa1-X-HSA_(X = CTSL1-1) |
| ACP205 | HSA-X-mIFNa1-X-HSA_(X = ADAM17-2) |
| ACP206 | HSA-X-Human_IFNA2b-X-HSA_(X = MMP14-1) |
| ACP207 | HSA-X-Human_IFNA2b-X-HSA_(X = CTSL1-1) |
| ACP208 | HSA-X-Human_IFNA2b-X-HSA_(X = ADAM17-2) |
| ACP211 | HSA-X-mouse-IFNg-X-IFNa-X-mouse-IFNg-X-HSA_(X = MMP9-M) |
| ACP213 | mAlb(D3)-X-mouse-IFNg-X-mAlb(D3)-X-mouse-IFNg-X-mAlb(D3)_(X = MMP9-M) |
| ACP214 | mAlb(D1-L-D3)-X-mouse-IFNg-X-mAlb(D1-L-D3)-X-mouse-IFNg-X-mAlb(D1-L-D3)_(X = MMP9-M) |
| ACP215 | HSA-X-mouse-IFNg-X-HSA-X-mouse-IFNg-X-HSA_(X = MMP9-M + 17aa) |
| ACP240 | HSA-L-human_p40-L-mouse_p35-LL-Blocker_(non-cleavable; |
| | Blocker = briakinumab_Vl/Vh) |
| ACP241 | mAlb-X-human_p40-L-mouse_p35-XL-Blocker_(X = MMP9-M; |
| | Blocker = briakinumab_Vl/Vh) |
| ACP242 | human_p40-L-mouse_p35-XL-Blocker-X-mAlb_(X = MMP9-M; |
| | Blocker = briakinumab_Vl/Vh) |
| ACP243 | mIgG1_Fc-X-human_p40-L-mouse_p35-XL-Blocker_(X = MMP9-M; |
| | Blocker = briakinumab_Vl/Vh) |
| ACP244 | human_p40-L-mouse_p35-XL-Blocker-X-mIgGl_Fc_(X = MMP9-M; |
| | Blocker = briakinumab_Vl/Vh) |
| ACP245 | HSA-X-human_p40-L-mouse_p35-XL-Blocker(cleavable)_(X = MMP9-M; |
| | Blocker = briakinumab_Vl-X-Vh) |
| ACP247 | HSA-X-human_p40-L-mouse_p35-XL-Blocker_(Blocker = 3CYT5; |
| | X = MMP9-M) |
| ACP284 | HSA-X-mouse_p35-XL-Blocker_(Blocker = briakinumab_Vl/Vh; |
| | X = MMP9-M) |
| ACP285 | HSA-X-human_p40_C199S-L-mouse_p35 C92S-XL-Blocker_(Blocker = |
| | briakinumab_Vl/Vh; X = MMP9-M) |
| ACP286 | HSA-X-human p40-L(4xG4S (SEQ ID NO: 453))-mouse p35-XL-Blocker_(Blocker = |
| | briakinumab_Vl/Vh; X = MMP9-M) |
| ACP287 | HSA-X-human_p40_mouse_p35-XL-Blocker_(Blocker = |
| | briakinumab_Vl/Vh_VH44-VL100_disulfide; X = MMP9-M) |
| ACP288 | HSA-X-human_p40_mouse_p35-XL-Blocker_(Blocker = |
| | briakinumab_Vl/Vh_VH105-VL43_disulfide; X = MMP9-M) |
| ACP289 | Geneart_WW0048_IL2-X-HSA-LX-blocker_Fusion_protein-6xHis |
| ACP290 | IL2-X-HSA-LX-blocker_(X = MMP9-M; Blocker = 3TOW69) |
| ACP291 | IL2-X-HSA-LX-blocker_(X = MMP9-M; Blocker = 3TOW85) |
| ACP292 | IL2-X-HSA-LX-blocker_(X = MMP9-M; Blocker = 2TOW91) |
| ACP296 | IL2-X-HSA-LX-blocker(cleavable)_(X = MMP9-M; Blocker = MT204_Vh-X-Vl) |
| ACP297 | IL2-X-HSA-LX-blocker(A46L)_(X = MMP9-M; Blocker = MT204_Vh/Vl) |
| ACP298 | IL2-X-HSA-LX-blocker(A46G)_(X = MMP9-M; Blocker = MT204_Vh/Vl) |
| ACP299 | IL2(Cysl45Ser)-X-HSA-LX-blocker_(X = MMP9-M; Blocker = MT204_Vh/Vl) |
| ACP300 | IL2-X-hAlb-LX-blocker_(X = MMP9-M; Blocker = MT204_Vh/Vl) |
| ACP302 | IL2-X-mAlb-LX-blocker_(X = MMP9-M; Blocker = MT204_Vh/Vl) |
| ACP303 | mAlb-X-IL2(Nterm-41)-X-mALB_(X = MMP9-M) |
| ACP304 | IL2-X-HSA-LX-blocker-XL-CD25ecd_(X = MMP9-M; Blocker = MT204_Vh/Vl) |
| ACP305 | CD25ecd-LX-IL2-X-HSA-LX-blocker_(X = MMP9-M; Blocker = MT204_Vh/Vl) |
| ACP306 | IL2-XL-CD25ecd-X-HSA-LX-blocker_(X = MMP9-M; Blocker = MT204_Vh/Vl) |
| ACP309 | IL2-X-HSA-LX-blocker(A46S)_(X = MMP9-M; Blocker = MT204_Vh/Vl) |
| ACP310 | IL2-X-HSA-LX-blocker(QAPRL_FR2)_(X = MMP9-M; Blocker = MT204_Vh/Vl) |
| ACP311 | IL2-X-IgG4_Fc(S228P)-LX-Blocker_(X = MMP9-M; Blocker = MT204_Vh/Vl) |
| ACP312 | IgG4_Fc(S228P)-X-IL2-LX-Blocker_(X = MMP9-M; Blocker = MT204_Vh/Vl) |
| ACP313 | IL2-XL-Blocker-X-IgG4_Fc(S228P)_(X = MMP9-M; Blocker = MT204_Vh/Vl) |
| ACP314 | mIgG1_Fc-X-IL2-LX-Blocker_(X = MMP9-M; Blocker = MT204_Vh/Vl) |
| ACP336 | IL2-X-anti-HSA-LX-blocker_(Blocker = |
| | VHVL.F2.high.A02_Vh-X-Vl_A46S; X = MMP14-1) |
| ACP337 | IL2-X-anti-HSA-LX-blocker_(Blocker = |
| | VHVL.F2.high.A02_Vh/Vl_A46S; X = MMP14-1) |
| ACP338 | IL2-X-anti-HSA-LX-blocker_(Blocker = VHVL.F2.high.F03_Vh-X-Vl; X = MMP14-1) |
| ACP339 | IL2-X-anti-HSA-LX-blocker_(Blocker = VHVL.F2.high.F03_Vh/Vl; X = MMP14-1) |
| ACP340 | IL2-X-anti-HSA-LX-blocker_(Blocker = Hu2TOW91_B; X = MMP14-1) |
| ACP341 | IL2-X-anti-HSA-LX-blocker_(Blocker = Hu3TOW85_A; X = MMP14-1) |
| ACP342 | CD25ecd_C213S-LX-IL2-X-anti-HSA-LX-blocker_(Blocker = |
| | VHVL.F2.high.A02_Vh-X-Vl_A46S; X = MMP14-1) |
| ACP343 | CD25ecd_C213S-LX-IL2-X-anti-HSA-LX-blocker_(Blocker = |
| | VHVL.F2.high.A02_Vh/Vl_A46S; X = MMP14-1) |
| ACP344 | CD25ecd_C213S-LX-IL2-X-anti-HSA-LX-blocker_(Blocker = |
| | VHVL.F2.high.F03_Vh-X-Vl; X = MMP14-1) |
| ACP345 | CD25ecd_C213S-LX-IL2-X-anti-HSA-LX-blocker_(Blocker = |
| | VHVL.F2.high.F03_Vh/Vl; X = MMP14-1) |
| ACP346 | CD25ecd_C213S-LX-IL2-X-anti-HSA-LX-blocker_(Blocker = |
| | Hu2TOW91_B; X = MMP14-1) |
| ACP347 | CD25ecd_C213S-LX-IL2-X-anti-HSA-LX-blocker_(Blocker = |
| | Hu3TOW85_A; X = MMP14-1) |
| ACP348 | IgG4_Fc(S228P)-X-IL2-LX-Blocker_(Blocker = |
| | VHVL.F2.high.A02_Vh-X-Vl_A46S; X = MMP14-1) |
| ACP349 | IgG4_Fc(S228P)-X-IL2-LX-Blocker_(Blocker = |
| | VHVL.F2.high.A02_Vh\Vl_A46S; X = MMP14-1) |
| ACP350 | IgG4_Fc(S228P)-X-IL2-LX-Blocker_(Blocker = |
| | VHVL.F2.high.F03_Vh-X-Vl; X = MMP14-1) |
| ACP351 | IgG4_Fc(S228P)-X-IL2-LX-Blocker (Blocker = |
| | VHVL.F2.high.F03_Vh\Vl; X = MMP14-1) |
| ACP352 | IgG4_Fc(S228P)-X-IL2-LX-Blocker_(Blocker = Hu2TOW91_B; X = MMP14-1) |
| ACP353 | IgG4_Fc(S228P)-X-IL2-LX-Blocker_(Blocker = Hu3TOW85_A; X = MMP14-1) |
| ACP354 | IgG4_Fc(S228P)-X-CD25ecd_C213S-LX-IL2-LX-Blocker_(Blocker = |
| | VHVL.F2.high.A02_Vh-X-Vl_A46S; X = MMP14-1) |
| ACP355 | IgG4_Fc(S228P)-X-CD25ecd_C213S-LX-IL2-LX-Blocker_(Blocker = |
| | VHVL.F2.high.A02_Vh\Vl_A46S; X = MMP14-1) |
| ACP356 | IgG4_Fc(S228P)-X-CD25ecd_C213S-LX-IL2-LX-Blocker_(Blocker = |
| | VHVL.F2.high.F03_Vh-X-V1; X = MMP14-1) |
| ACP357 | IgG4_Fc(S228P)-X-CD25ecd_C213S-LX-IL2-LX-Blocker_(Blocker = |
| | VHVL.F2.high.F03_Vh\Vl; X = MMP14-1) |
| ACP358 | IgG4_Fc(S228P)-X-CD25ecd_C213S-LX-IL2-LX-Blocker_(Blocker = |
| | Hu2TOW91_B; X = MMP14-1) |
| ACP359 | IgG4_Fc(S228P)-X-CD25ecd_C213S-LX-IL2-LX-Blocker_(Blocker = |
| | Hu3TOW85_A; X = MMP14-1) |
| ACP371 | IL2-X-anti-HSA-LX-blocker_(Blocker = |
| | MT204_Vh/Vl_VH44-VL100_disulfide; X = MMP14-1) |
| ACP372 | IL2-X-anti-HSA-LX-blocker_(Blocker = |
| | MT204_Vh/Vl_VH105-VL43_disulfide; X = MMP14-1) |
| ACP373 | IL2-X-anti-HSA-LX-blocker_(Blocker = |
| | VHVL.F2.high.A02_Vh/Vl_VH44-VL100_disulfide; X = MMP14-1) |
| ACP374 | IL2-X-anti-HSA-LX-blocker_(Blocker = |
| | VHVL.F2.high.A02_Vh/Vl_VH105-VL43_disulfide; X = MMP14-1) |
| ACP375 | IL2-X-anti-HSA-LX-blocker_(Blocker = |
| | VHVL.F2.high.F03_Vh/Vl_VH44-VL100_disulfide; X = MMP14-1) |
| ACP376 | IL2-X-anti-HSA-LX-blocker_(Blocker = |
| | VHVL.F2.high.F03_Vh/Vl_VH105-VL43_disulfideX = MMP14-1) |
| ACP377 | IL2-X-anti-HSA-LX-blocker_(Blocker = Hu2TOW91_A; X = MMP14-1) |
| ACP378 | IL2-X-anti-HSA-LX-Heavy_blocker_Fab_(Blocker = MT204_VH-CH1; X = MMP14-1) |
| ACP379 | IgG4_Fc(S228P)-X-IL2-LX-Heavy_blocker_Fab_(Blocker = |
| | MT204_VH-CH1; X = MMP14-1) |
| ACP383 | IgG4_Fc(S228P)-X-IL2-LX-blocker_(Blocker = |
| | MT204_Vh/Vl_VH44-VL100_disulfide; X = MMP14-1) |
| ACP384 | IgG4_Fc(S228P)-X-IL2-LX-blocker_(Blocker = |
| | MT204_Vh/Vl_VH105-VL43_disulfide; X = MMP14-1) |
| ACP385 | IgG4_Fc(S228P)-X-IL2-LX-blocker_(Blocker = VHVL.F2.high.A02_Vh/Vl_VH44-VL100_disulfide; X = MMP14-1) |
| ACP386 | IgG4_Fc(S228P)-X-IL2-LX-blocker_(Blocker = VHVL.F2.high.A02_Vh/Vl_VH105-VL43_disulfide; X = MMP14-1) |
| ACP387 | IgG4_Fc(S228P)-X-IL2-LX-blocker_(Blocker = VHVL.F2.high.F03_Vh/Vl_VH44-VL100_disulfide; X = MMP14-1) |
| ACP388 | IgG4_Fc(S228P)-X-IL2-LX-blocker_(Blocker = VHVL.F2.high.F03_Vh/Vl_VH105-VL43_disulfide; X = MMP14-1) |
| ACP389 | IgG4_Fc(S228P)-X-IL2-LX-blocker_(Blocker = Hu2TOW91_A; X = MMP14-1) |
| ACP390 | IL2-X-anti-HSA-LX-blocker_(Blocker = VHVL.F2.high.A02_Vh/Vl_A46S_VH44-VL100_disulfide; X = MMP14-1) |
| ACP391 | IgG4_Fc(S228P)-X-IL2-LX-blocker_(Blocker = |
| | VHVL.F2.high.A02_Vh/Vl_A46S_VH44-VL100_disulfide; X = MMP14-1) |
| ACP392 | IL2-XL-CD25ecd_C213S-X-HSA-LX-blocker_(Blocker = |
| | VHVL.F2.high.A02_Vh_G44C_Vl_A46S_G100C; X = MMP14-1) |
| ACP393 | IL2-XL-CD25ecd_C213S-X-HSA-LX-blocker_(Blocker = |
| | VHVL.F2.high.A02_Vh_Q105C_Vl_A43C; X = MMP14-1) |
| ACP394 | IL2-XL-CD25ecd_C213S-X-HSA-LX-blocker_(Blocker = |
| | VHVL.F2.high.F03_Vh_G44C_Vl_G100C; X = MMP14-1) |
| ACP395 | IL2-XL-CD25ecd_C213S-X-HSA-LX-blocker_(Blocker = |
| | VHVL.F2.high.F03_Vh_Q105C_Vl_A43C; X = MMP14-1) |
| ACP396 | IL2-XL-CD25ecd_C213S-X-HSA-LX-blocker_(Blocker = |
| | Hu2TOW91_A; X = MMP14-1) |
| ACP397 | IL2-XL-CD25ecd_C213S-X-HSA-LX-blocker_(Blocker = |
| | Hu2TOW91_B; X = MMP14-1) |
| ACP398 | IL2-XL-CD25ecd_C213S-X-HSA-LX-Heavy_blocker_Fab_(Blocker = |
| | MT204_VH-CH1; X = MMP14-1) |
| ACP399 | Blocker-XL-HSA-X-IL2(Nterm-41)-X-HSA)_(Blocker = |
| | VHVL.F2.high.A02_Vh_G44C_Vl_A46S_G100C; X = MMP14-1) |
| ACP400 | Blocker-XL-HSA-X-IL2(Nterm-41)-X-HSA_(Blocker = |
| | VHVL.F2.high.A02_Vh_Q105C_Vl_A43C; X = MMP14-1) |
| ACP401 | Blocker-XL-HSA-X-IL2(Nterm-41)-X-HSA_(Blocker = |
| | VHVL.F2.high.F03_Vh_G44C_Vl_G100C; X = MMP14-1) |
| ACP402 | Blocker-XL-HSA-X-IL2(Nterm-41)-X-HSA_(Blocker = |
| | VHVL.F2.high.F03_Vh_Q105C_Vl_A43C; X = MMP14-1) |
| ACP403 | Blocker-XL-HSA-X-IL2(Nterm-41)-X-HSA_(Blocker = Hu2TOW91_A; X = MMP14-1) |
| ACP404 | Blocker-XL-HSA-X-IL2(Nterm-41)-X-HSA_(Blocker = Hu2TOW91_B; X = MMP14-1) |
| ACP405 | Heavy_Blocker_Fab-XL-HSA-X-IL2(Nterm-41)-X-HSA_(Blocker = |
| | MT204_VH-CH1; X = MMP14-1) |
| ACP406 | mIgG1_Fc(S228P)-X-IL2-LX-Heavy_blocker_Fab_(Blocker = |
| | MT204_VH-CH1; X = MMP14-1) |
| ACP407 | mIgG1_Fc(S228P)-X-IL2-LX-blocker_(Blocker = |
| | VHVL.F2.high.A02_Vh/Vl_VH44-VL100_disulfide; X = MMP14-1) |
| ACP408 | mIgG1_Fc(S228P)-X-IL2-LX-blocker_(Blocker = |
| | VHVL.F2.high.A02_Vh/Vl_A46S_VH44-VL100_disulfide; X = MMP14-1) |
| ACP409 | mIgG1_Fc(S228P)-X-IL2-LX-blocker_(Blocker = |
| | VHVL.F2.high.A02_Vh/Vl_VH105-VL43_disulfidel; X = MMP14-1) |
| ACP410 | mIgG1_Fc(S228P)-X-IL2-LX-blocker_(Blocker = |
| | VHVL.F2.high.F03_Vh/Vl_VH44-VL100_disulfidel; X = MMP14-1) |
| ACP411 | mIgG1_Fc(S228P)-X-IL2-LX-blocker_(Blocker = |
| | VHVL.F2.high.F03_Vh/Vl_VH105-VL43_disulfidel; X = MMP14-1) |
| ACP412 | mIgG1_Fc(S228P)-X-IL2-LX-blocker_(Blocker = Hu2TOW91_A; X = MMP14-1) |
| ACP413 | CD25_213S-L-Kappa_blocker_Fab_(Blocker = VHVL.F2.high.A02_A46S_Kappa) |
| ACP414 | CD25_213S-L-Kappa_blocker_Fab_(Blocker = VHVL.F2.high.F03_Kappa) |
| ACP415 | IL2-XL-blocker-L-CD25_213S-X-HSA_Blocker = |
| | VHVL.F2.high.A02_Vh_G44C_Vl_A46S_G100C; X = MMP14-1) |
| ACP416 | IL2-XL-blocker-L-CD25_213S-X-HSA_(Blocker = |
| | VHVL.F2.high.A02_Vh_Q105C_Vl_A43C; X = MMP14-1) |
| ACP417 | IL2-XL-blocker-L-CD25_213S-X-HSA_(Blocker = |
| | VHVL.F2.high.F03_Vh_G44C_Vl_G100C; X = MMP14-1) |
| ACP418 | IL2-XL-blocker-L-CD25_213S-X-HSA_(Blocker = |
| | VHVL.F2.high.F03_Vh_Q105C_Vl_A43C; X = MMP14-1) |
| ACP419 | IL2-XL-blocker-L-CD25_213S-X-HSA_(Blocker = Hu2TOW91_A; X = MMP14-1) |
| ACP420 | IL2-XL-blocker-L-CD25_213S-X-HSA_(Blocker = Hu2TOW91_B; X = MMP14-1) |
| ACP421 | HSA-X-blocker-L-CD25_213S-LX-IL2_(Blocker = |
| | VHVL.F2.high.A02_Vh_G44C_Vl_A46S_G100C; X = MMP14-1) |
| ACP422 | HSA-X-blocker-L-CD25_213S-LX-IL2_(Blocker = |
| | VHVL.F2.high.A02_Vh_Q105C_Vl_A43C; X = MMP14-1) |
| ACP423 | HSA-X-blocker-L-CD25_213S-LX-IL2_(Blocker = |
| | VHVL.F2.high.F03_Vh_G44C_Vl_G100C; X = MMP14-1) |
| ACP424 | HSA-X-blocker-L-CD25_213S-LX-IL2_(Blocker = |
| | VHVL.F2.high.F03_Vh_Q105C_Vl_A43C; X = MMP14-1) |
| ACP425 | HSA-X-blocker-L-CD25_213S-LX-IL2_(Blocker = Hu2TOW91_A; X = MMP14-1) |
| ACP426 | HSA-X-blocker-L-CD25_213S-LX-IL2_(Blocker = Hu2TOW91_B; X = MMP14-1) |
| ACP427 | IL2-X-anti-HSA-LX-Blocker1-L-Blocker2_(Blocker1 = |
| | VHVL.F2.high.A02_Vh_G44C_Vl_A46S_G100C, |
| | Blocker2 = Hu2TOW91_A; X = MMP14-1) |
| ACP428 | IL2-X-anti-HSA-LX-Blocker1-L-Blocker2_(Blocker1 = |
| | VHVL.F2.high.A02_Vh_Q105C_Vl_A43C, |
| | Blocker2 = Hu2TOW91_A; X = MMP14-1) |
| ACP429 | IL2-X-anti-HSA-LX-Blocker1-L-Blocker2_(Blocker1 = |
| | VHVL.F2.high.F03_Vh_G44C_Vl_G100C, |
| | Blocker2 = Hu2TOW91_A; X = MMP14-1) |
| ACP430 | IL2-X-anti-HSA-LX-Blocker1-L-Blocker2_(Blocker1 = |
| | VHVL.F2.high.F03_Vh_Q105C_Vl_A43C, |
| | Blocker2 = Hu2TOW91_A; X = MMP14-1) |
| ACP431 | IL2-X-anti-HSA-LX-Blocker1-L-Blocker2_(Blocker1 = |
| | VHVL.F2.high.A02_Vh_G44C_Vl_A46S_G100C, |
| | Blocker2 = Hu2TOW91_B; X = MMP14-1) |
| ACP432 | IL2-X-anti-HSA-LX-Blocker1-L-Blocker2_(Blocker1 = |
| | VHVL.F2.high.A02_Vh_Q105C_Vl_A43C, |
| | Blocker2 = Hu2TOW91_B; X = MMP14-1) |
| ACP433 | IL2-X-anti-HSA-LX-Blocker1-L-Blocker2_(Blocker1 = |
| | VHVL.F2.high.F03_Vh_G44C_Vl_G100C, |
| | Blocker2 = Hu2TOW91_B; X = MMP14-1) |
| ACP434 | IL2-X-anti-HSA-LX-Blocker1-L-Blocker2_(Blocker1 = |
| | VHVL.F2.high.F03_Vh_Q105C_Vl_A43C, |
| | Blocker2 = Hu2TOW91_B; X = MMP14-1) |
| ACP439 | IL2-X-anti-HSA-LX-blocker_(Blocker = |
| | VHVL.F2.high.C07_Vh/Vl; X = MMP14-1) |
| ACP440 | IL2-X-anti-HSA-LX-blocker_(Blocker = |
| | VHVL.F2.high.C07_Vh/Vl_A46S; X = MMP14-1) |
| ACP441 | IL2-X-anti-HSA-LX-blocker_(Blocker = |
| | VHVL.F2.high.C07_Vh/Vl_A46L; X = MMP14-1) |
| ACP442 | IL2-X-anti-HSA-LX-blocker_(Blocker = |
| | VHVL.F2.high.C07_Vh/Vl_A46S_VH44-VL100_disulfide; X = MMP14-1) |
| ACP443 | IL2-X-anti-HSA-LX-blocker_(Blocker = |
| | VHVL.F2.high.C07_Vh/Vl_A46L_VH44-VL100_disulfide; X = MMP14-1) |
| ACP444 | IL2-X-anti-HSA-LX-blocker_(Blocker = |
| | VHVL.F2.high.C07_Vh/Vl_VH105-VL43_disulfide; X = MMP14-1) |
| ACP445 | IL2-X-anti-HSA-LX-blocker_(Blocker = VHVL.F2.high.A02_Vh-X-Vl_A46L; |
| | X = MMP14-1) |
| ACP446 | IL2-X-anti-HSA-LX-blocker_(Blocker = VHVL.F2.high.A02_Vh/Vl_A46L; X = MMP14-1) |
| ACP447 | IL2-X-anti-HSA-LX-blocker_(Blocker = |
| | VHVL.F2.high.A02_Vh/Vl_A46L_VH44-VL100_disulfide; X = MMP14-1) |
| ACP451 | IL2-X-anti-HSA-LX-blocker_(Blocker = VHVL.F2.high.A02_Vh/Vl_A46S; X = CTSL1-1) |
| ACP452 | IL2-X-anti-HSA-LX-blocker_(Blocker = VHVL.F2.high.F03_Vh/Vl; X = CTSL1-1) |
| ACP453 | IL2-X-anti-HSA-LX-blocker_(Blocker = |
| | VHVL.F2.high.A02_Vh/Vl_A46S_VH44-VL100_disulfide; X = CTSL1-1) |
| ACP454 | IL2-X-anti-HSA-LX-blocker_(Blocker = |
| | VHVL.F2.high.A02_Vh/Vl_VH105-VL43_disulfidel; X = CTSL1-1) |
| ACP455 | IL2-X-anti-HSA-LX-blocker_(Blocker = |
| | VHVL.F2.high.F03_Vh/Vl_VH44-VL100_disulfide; X = CTSL1-1) |
| ACP456 | IL2-X-anti-HSA-LX-blocker_(Blocker = |
| | VHVL.F2.high.F03_Vh/Vl_VH105-VL43_disulfideX = CTSL 1-1) |
| ACP457 | IL2-X-anti-HSA-LX-Heavy_blocker_Fab_(Blocker = MT204_VH-CH1; X = CTSL1-1) |
| ACP458 | IgG4_Fc(S228P)-X-IL2-LX-Heavy_blocker_Fab_(Blocker = |
| | MT204_VH-CH1; X = CTSL1-1) |
| ACP459 | IgG4_Fc(S228P)-X-IL2-LX-Blocker_(Blocker = |
| | VHVL.F2.high.A02_Vh\Vl_A46S; X = CTSL1-1) |
| ACP460 | IgG4_Fc(S228P)-X-IL2-LX-Blocker_(Blocker = |
| | VHVL.F2.high.F03_Vh\Vl; X = CTSL1-1) |
| ACP461 | IgG4_Fc(S228P)-X-IL2-LX-blocker_(Blocker = |
| | VHVL.F2.high.A02_Vh/Vl_A46S_VH44-VL100_disulfide; X = CTSL1-1) |
| ACP462 | IgG4_Fc(S228P)-X-IL2-LX-blocker_(Blocker = |
| | VHVL.F2.high.A02_Vh/Vl_VH105-VL43_disulfidel; X = CTSL1-1) |
| ACP463 | IgG4_Fc(S228P)-X-IL2-LX-blocker_(Blocker = |
| | VHVL.F2.high.F03_Vh/Vl_VH44-VL100_disulfidel; X = CTSL1-1) |
| ACP464 | IgG4_Fc(S228P)-X-IL2-LX-blocker_(Blocker = |
| | VHVL.F2.high.F03_Vh/Vl_VH105-VL43_disulfidel; X = CTSL1-1) |
| ACP465 | mIgG1_Fc-X-IL2-LX-Blocker_(Blocker = VHVL.F2.high.A02_Vh\Vl_A46S; |
| | X = CTSL1-1) |
| ACP466 | mIgG1_Fc-X-IL2-LX-Blocker_(Blocker = VHVL.F2.high.F03_Vh\Vl; X = CTSL1-1) |
| ACP467 | mIgG1_Fc-X-IL2-LX-blocker_(Blocker = |
| | VHVL.F2.high.A02_Vh/Vl_A46S_VH44-VL100_disulfide; X = CTSL1-1) |
| ACP468 | mIgG1_Fc-X-IL2-LX-blocker_(Blocker = |
| | VHVL.F2.high.A02_Vh/Vl_VH105-VL43_disulfidel; X = CTSL1-1) |
| ACP469 | mIgG1_Fc-X-IL2-LX-blocker_(Blocker = |
| | VHVL.F2.high.F03_Vh/Vl_VH44-VL100_disulfidel; X = CTSL1-1) |
| ACP470 | mIgG1_Fc-X-IL2-LX-blocker_(Blocker = |
| | VHVL.F2.high.F03_Vh/Vl_VH105-VL43_disulfidel; X = CTSL1-1) |
| ACP471 | mIgG1_Fc-X-IL2-LX-Heavy_blocker_Fab_(Blocker = MT204_VH-CH1; X = CTSL1-1) |

SEQUENCE TABLE

| SEQ | | |
|---|---|---|
| ID | | |
| NO. | Name | Sequence |
| 1 | Human | MYRMQLLSCI ALSLALVTNS APTSSSTKKT QLQLEHLLLD LQMILNGINN |
| | IL-2 | YKNPKLTRML TFKFYMPKKA TELKHLQCLE EELKPLEEVL NLAQSKNFHL |
| | | RPRDLISNIN VIVLELKGSE TTFMCEYADE TATIVEFLNR WITFCQSIISTLT |
| 2 | Human | MKWVTFISLL FLFSSAYSRG VFRRDAHKSE VAHRFKDLGE ENFKALVLIA |
| | serum | FAQYLQQCPF EDHVKLVNEV TEFAKTCVAD ESAENCDKSL HTLFGDKLCT |
| | albumin | VATLRETYGE MADCCAKQEP ERNECFLQHK DDNPNLPRLV RPEVDVMCTA |
| | | FHDNEETFLK KYLYEIARRH PYFYAPELLF FAKRYKAAFT ECCQAADKAA |
| | | CLLPKLDELR DEGKASSAKQ GLKCASLQKF GERAFKAWAV ARLSQRFPKA |
| | | EFAEVSKLVT DLTKVHTECC HGDLLECADD RADLAKYICE NQDSISSKLK |
| | | ECCEKPLLEK SHCIAEVEND EMPADLPSLA ADFVGSKDVC KNYAEAKDVF |
| | | LGMFLYEYAR RHPDYSVVLL LRLAKTYETT LEKCCAAADP HECYAKVFDE |
| | | FKPLVEEPQN LIKQNCELFE QLGEYKFQNA LLVRYTKKVP QVSTPTLVEV |
| | | SRNLGKVGSK CCKHPEAKRM PCAEDCLSVF LNQLCVLHEK TPVSDRVTKC |
| | | CTESLVNGRPCFSALEVDETYVPKEFNAETFTFHADICTLSEKERQIKKQTALV |
| | | ELVKHK PKATKEQLKAVMDDFAAFVEKCCKADDKET |
| | | CFAEEGKKLVAASQAALGL |
| 45 | ACP12 | QVQLQESGGGLVQAGGSLRLSCAASGRIFSIDIMSWYRQAPGKQRELVARITRG |
| | (IL2 | GTISYDDSVKGRFTISRDNAKNTVYLQMNSLKPEDTGVYYCNALYGTDYWGKG |
| | fusion | TQVTVSSggggsggggsggggsaptssstkktqlqlehllldlqmilnginnyknpkltrmltfkfympkkatelkhlq |
| | protein) | cleeelkpleevlnlaqsknfhlrprdlisninvivlelkgsettfmceyadetativeflnrwitfcqsiistltSGGPGPAG |
| | | MKGLPGSEVQLVESGGGLVQPGNSLRLSCAASGFTFSKFGMSWVRQAPGKGLE |
| | | WVSSISGSGRDTLYAESVKGRFTISRDNAKTTLYLQMNSLRPEDTAVYYCTIGGS |
| | | LSVSSQGTLVTVSSggggsggggsggggsEVQLVESGGGLVQPGGSLRLSCAASGFTFS |
| | | SYTLAWVRQAPGKGLEWVAAIDSSSYTYSPDTVRGRFTISRDNAKNSLYLQMNS |
| | | LRAEDTAVYYCARDSNWDALDYWGQGTTVTVSSGGGGSGGGGSGGGGSDIQM |
| | | TQSPSSLSASVGDRVTITCKASQNVGTNVGWYQQKPGKAPKALIYSASFRYSGV |
| | | PSRFSGSGSGTDFTLTISSLQPEDFATYYCQQYYTYPYTFGGGTKVEIKHHHHHH |
| 46 | ACP13 | QVQLQESGGGLVQAGGSLRLSCAASGRIFSIDIMSWYRQAPGKQRELVARITRG |
| | (IL2 | GTISYDDSVKGRFTISRDNAKNTVYLQMNSLKPEDTGVYYCNALYGTDYWGKG |
| | fusion | TQVTVSSggggsggggsggggsEVQLVESGGGLVQPGGSLRLSCAASGFTFSSYTLAW |
| | protein) | VRQAPGKGLEWVAAIDSSSYTYSPDTVRGRFTISRDNAKNSLYLQMNSLRAEDT |
| | | AVYYCARDSNWDALDYWGQGTTVTVSSGGGGSGGGGSGGGGSDIQMTQSPSS |
| | | LSASVGDRVTITCKASQNVGTNVGWYQQKPGKAPKALIYSASFRYSGVPSRFSG |
| | | SGSGTDFTLTISSLQPEDFATYYCQQYYTYPYTFGGGTKVEIKggggsggggsggggsE |
| | | VQLVESGGGLVQPGNSLRLSCAASGFTFSKFGMSWVRQAPGKGLEWVSSISGSG |
| | | RDTLYAESVKGRFTISRDNAKTTLYLQMNSLRPEDTAVYYCTIGGSLSVSSQGTL |
| | | VTVSSSGGPGPAGMKGLPGSaptssstkktqlqlehllldlqmilnginnyknpkltrmltfkfympkkatel |
| | | khlqcleeelkpleevlnlaqsknfhlrprdlisninvivlelkgsettfmceyadetativeflnrwitfcqsiistltHHHHH |
| | | H |
| 47 | ACP14 | EVQLVESGGGLVQPGGSLRLSCAASGFTFSSYTLAWVRQAPGKGLEWVAAIDSS |
| | (IL2 | SYTYSPDTVRGRFTISRDNAKNSLYLQMNSLRAEDTAVYYCARDSNWDALDYW |
| | fusion | GQGTTVTVSSGGGGSGGGGSGGGGSDIQMTQSPSSLSASVGDRVTITCKASQNV |
| | protein) | GTNVGWYQQKPGKAPKALIYSASFRYSGVPSRFSGSGSGTDFTLTISSLQPEDFA |
| | | TYYCQQYYTYPYTFGGGTKVEIKggggsggggsggggsggggsggggsggggsSGGPGPAGM |
| | | KGLPGSaptssstkktqlqlehllldlqmilnginnyknpkltrmltfkfympkkatelkhlqcleeelkpleevlnlaqsk |
| | | nfhlrprdlisninvivlelkgsettfmceyadetativeflnrwitfcqsiistltSGGPGPAGMKGLPGSEVQL |
| | | VESGGGLVQPGNSLRLSCAASGFTFSKFGMSWVRQAPGKGLEWVSSISGSGRDT |
| | | LYAESVKGRFTISRDNAKTTLYLQMNSLRPEDTAVYYCTIGGSLSVSSQGTLVTV |
| | | SSHHHHHH |
| 48 | ACP15 | EVQLVESGGGLVQPGGSLRLSCAASGFTFSSYTLAWVRQAPGKGLEWVAAIDSS |
| | (IL2 | SYTYSPDTVRGRFTISRDNAKNSLYLQMNSLRAEDTAVYYCARDSNWDALDYW |
| | fusion | GQGTTVTVSSGGGGSGGGGSGGGGSDIQMTQSPSSLSASVGDRVTITCKASQNV |
| | protein) | GTNVGWYQQKPGKAPKALIYSASFRYSGVPSRFSGSGSGTDFTLTISSLQPEDFA |
| | | TYYCQQYYTYPYTFGGGTKVEIKggggsggggsggggsggggsggggsggggsEVQLVESGG |
| | | GLVQPGNSLRLSCAASGFTFSKFGMSWVRQAPGKGLEWVSSISGSGRDTLYAES |
| | | VKGRFTISRDNAKTTLYLQMNSLRPEDTAVYYCTIGGSLSVSSQGTLVTVSSgggg |
| | | sggggsggggsSGGPGPAGMKGLPGSaptssstkktqlqlehllldlqmilnginnyknpkltrmltfkfympk |
| | | katelkhlqcleeelkpleevlnlaqsknfhlrprdlisninvivlelkgsettfmceyadetativeflnrwitfcqsiistltHH |
| | | HHHH |
| 49 | ACP16 | aptssstkktqlqlehllldlqmilnginnyknpkltrmltfkfympkkatelkhlqcleeelkpleevlnlaqsknfhlrprdli |
| | (IL2 | sninvivlelkgsettfmceyadetativeflnrwitfcqsiistltSGGPGPAGMKGLPGSEVQLVESGGG |
| | fusion | LVQPGNSLRLSCAASGFTFSKFGMSWVRQAPGKGLEWVSSISGSGRDTLYAESV |
| | protein) | KGRFTISRDNAKTTLYLQMNSLRPEDTAVYYCTIGGSLSVSSQGTLVTVSSggggsg |
| | | gggsggggsggggsggggsggggsSGGPGPAGMKGLPGSEVQLVESGGGLVQPGGSLRLS |
| | | CAASGFTFSSYTLAWVRQAPGKGLEWVAAIDSSSYTYSPDTVRGRFTISRDNAK |
| | | NSLYLQMNSLRAEDTAVYYCARDSNWDALDYWGQGTTVTVSSGGGGSGGGGS |
| | | GGGGSDIQMTQSPSSLSASVGDRVTITCKASQNVGTNVGWYQQKPGKAPKALIY |
| | | SASFRYSGVPSRFSGSGSGTDFTLTISSLQPEDFATYYCQQYYTYPYTFGGGTKV |
| | | EIKHHHHHH |
| 50 | ACP17 | QVQLQESGGGLVQAGGSLRLSCAASGRIFSIDIMSWYRQAPGKQRELVARITRG |
| | (IL2 | GTISYDDSVKGRFTISRDNAKNTVYLQMNSLKPEDTGVYYCNALYGTDYWGKG |
| | fusion | TQVTVSSggggsggggsggggsaptssstkktqlqlehllldlqmilnginnyknpkltrmltfkfympkkatelkhlq |
| | protein) | cleeelkpleevlnlaqsknfhlrprdlisninvivlelkgsettfmceyadetativeflnrwitfcqsiistltSGGPGPAG |
| | | MKGLPGSEVQLVESGGGLVQPGNSLRLSCAASGFTFSKFGMSWVRQAPGKGLE |
| | | WVSSISGSGRDTLYAESVKGRFTISRDNAKTTLYLQMNSLRPEDTAVYYCTIGGS |
| | | LSVSSQGTLVTVSSggggsggggsggggsggggsggggsggggsSGGPGPAGMKGLPGSEVQ |
| | | LVESGGGLVQPGGSLRLSCAASGFTFSSYTLAWVRQAPGKGLEWVAAIDSSSYT |
| | | YSPDTVRGRFTISRDNAKNSLYLQMNSLRAEDTAVYYCARDSNWDALDYWGQ |
| | | GTTVTVSSGGGGSGGGGSGGGGSDIQMTQSPSSLSASVGDRVTITCKASQNVGT |
| | | NVGWYQQKPGKAPKALIYSASFRYSGVPSRFSGSGSGTDFTLTISSLQPEDFATY |
| | | YCQQYYTYPYTFGGGTKVEIKHHHHHH |
| 51 | ACP18 | QVQLQESGGGLVQAGGSLRLSCAASGRIFSIDIMSWYRQAPGKQRELVARITRG |
| | (IL2 | GTISYDDSVKGRFTISRDNAKNTVYLQMNSLKPEDTGVYYCNALYGTDYWGKG |
| | fusion | TQVTVSSggggsggggsggggsaptssstkktqlqlehllldlqmilnginnyknpkltrmltfkfympkkatelkhlq |
| | protein) | cleeelkpleevlnlaqsknfhlrprdlisninvivlelkgsettfmceyadetativeflnrwitfcqsiistltSGGPGPAG |
| | | MKGLPGSEVQLVESGGGLVQPGNSLRLSCAASGFTFSKFGMSWVRQAPGKGLE |
| | | WVSSISGSGRDTLYAESVKGRFTISRDNAKTTLYLQMNSLRPEDTAVYYCTIGGS |
| | | LSVSSQGTLVTVSSggggsggggsggggsggggsggggsggggsEVQLVESGGGLVQPGGSLR |
| | | LSCAASGFTFSSYTLAWVRQAPGKGLEWVAAIDSSSYTYSPDTVRGRFTISRDNA |
| | | KNSLYLQMNSLRAEDTAVYYCARDSNWDALDYWGQGTTVTVSSsggpgpagmkgl |
| | | pgsDIQMTQSPSSLSASVGDRVTITCKASQNVGTNVGWYQQKPGKAPKALIYSAS |
| | | FRYSGVPSRFSGSGSGTDFTLTISSLQPEDFATYYCQQYYTYPYTFGGGTKVEIKH |
| | | HHHHH |
| 52 | ACP19 | aptssstkktqlqlehllldlqmilnginnyknpkltrmltfkfympkkatelkhlqcleeelkpleevlnlaqsknfhlrprdli |
| | (IL2 | sninvivlelkgsettfmceyadetativeflnrwitfcqsiistltSGGPGPAGMKGLPGSggggsggggsggggs |
| | fusion | ggggsggggsggggsEVQLVESGGGLVQPGGSLRLSCAASGFTFSSYTLAWVRQAPGK |
| | protein) | GLEWVAAIDSSSYTYSPDTVRGRFTISRDNAKNSLYLQMNSLRAEDTAVYYCAR |
| | | DSNWDALDYWGQGTTVTVSSGGGGSGGGGSGGGGSDIQMTQSPSSLSASVGDR |
| | | VTITCKASQNVGTNVGWYQQKPGKAPKALIYSASFRYSGVPSRFSGSGSGTDFT |
| | | LTISSLQPEDFATYYCQQYYTYPYTFGGGTKVEIKggggsggggsggggsEVQLVESGG |
| | | GLVQPGNSLRLSCAASGFTFSKFGMSWVRQAPGKGLEWVSSISGSGRDTLYAES |
| | | VKGRFTISRDNAKTTLYLQMNSLRPEDTAVYYCTIGGSLSVSSQGTLVTVSSgggg |
| | | sggggsggggsQVQLQESGGGLVQAGGSLRLSCAASGRIFSIDIMSWYRQAPGKQRE |
| | | LVARITRGGTISYDDSVKGRFTISRDNAKNTVYLQMNSLKPEDTGVYYCNALYG |
| | | TDYWGKGTQVTVSSHHHHHH** |
| 53 | ACP20 | aptssstkktqlqlehllldlqmilnginnyknpkltrmltfkfympkkatelkhlqcleeelkpleevlnlaqsknfhlrprdli |
| | (IL2 | sninvivlelkgsettfmceyadetativeflnrwitfcqsiistltSGGPGPAGMKGLPGSEVQLVESGGG |
| | fusion | LVQPGGSLRLSCAASGFTFSSYTLAWVRQAPGKGLEWVAAIDSSSYTYSPDTVR |
| | protein) | GRFTISRDNAKNSLYLQMNSLRAEDTAVYYCARDSNWDALDYWGQGTTVTVS |
| | | SGGGGSGGGGSGGGGSDIQMTQSPSSLSASVGDRVTITCKASQNVGTNVGWYQ |
| | | QKPGKAPKALIYSASFRYSGVPSRFSGSGSGTDFTLTISSLQPEDFATYYCQQYYT |
| | | YPYTFGGGTKVEIKHHHHHH |
| 54 | ACP21 | aptssstkktqlqlehllldlqmilnginnyknpkltrmltfkfympkkatelkhlqcleeelkpleevlnlaqsknfhlrprdli |
| | (IL2 | sninvivlelkgsettfmceyadetativeflnrwitfcqsiistltSGGPGPAGMKGLPGSggggsggggsggggs |
| | fusion | ggggsggggsggggsEVQLVESGGGLVQPGGSLRLSCAASGFTFSSYTLAWVRQAPGK |
| | protein) | GLEWVAAIDSSSYTYSPDTVRGRFTISRDNAKNSLYLQMNSLRAEDTAVYYCAR |
| | | DSNWDALDYWGQGTTVTVSSGGGGSGGGGSGGGGSDIQMTQSPSSLSASVGDR |
| | | VTITCKASQNVGTNVGWYQQKPGKAPKALIYSASFRYSGVPSRFSGSGSGTDFT |
| | | LTISSLQPEDFATYYCQQYYTYPYTFGGGTKVEIKHHHHHH |
| 55 | ACP22 | aptssstkktqlqlehllldlqmilnginnyknpkltrmltfkfympkkatelkhlqcleeelkpleevlnlaqsknfhlrprdli |
| | (IL2 | sninvivlelkgsettfmceyadetativeflnrwitfcqsiistltSGGPGPAGMKGLPGSggggsggggsggggs |
| | fusion | ggggsggggsggggsEVQLVESGGGLVQPGGSLRLSCAASGFTFSSYTLAWVRQAPGK |
| | protein) | GLEWVAAIDSSSYTYSPDTVRGRFTISRDNAKNSLYLQMNSLRAEDTAVYYCAR |
| | | DSNWDALDYWGQGTTVTVSSGGGGSGGGGSGGGGSDIQMTQSPSSLSASVGDR |
| | | VTITCKASQNVGTNVGWYQQKPGKAPKALIYSASFRYSGVPSRFSGSGSGTDFT |
| | | LTISSLQPEDFATYYCQQYYTYPYTFGGGTKVEIKSGGPGPAGMKGLPGSEVQL |
| | | VESGGGLVQPGNSLRLSCAASGFTFSKFGMSWVRQAPGKGLEWVSSISGSGRDT |
| | | LYAESVKGRFTISRDNAKTTLYLQMNSLRPEDTAVYYCTIGGSLSVSSQGTLVTV |
| | | SSggggsggggsggggsQVQLQESGGGLVQAGGSLRLSCAASGRIFSIDIMSWYRQAPG |
| | | KQRELVARITRGGTISYDDSVKGRFTISRDNAKNTVYLQMNSLKPEDTGVYYCN |
| | | ALYGTDYWGKGTQVTVSSHHHHHH |
| 56 | ACP23 | QVQLQESGGGLAQAGGSLSLSCAASGFTVSNSVMAWYRQTPGKQREFVAIINSV |
| | (IL2 | GSTNYADSVKGRFTISRDNAKNTVYLQMNNLKPEDTAVYVCNRNFDRIYWGQG |
| | fusion | TQVTVSSSGGPGPAGMKGLPGSEVQLVESGGGLVQPGGSLRLSCAASGFTFSSY |
| | protein) | TLAWVRQAPGKGLEWVAAIDSSSYTYSPDTVRGRFTISRDNAKNSLYLQMNSLR |
| | | AEDTAVYYCARDSNWDALDYWGQGTTVTVSSGGGGSGGGGSGGGGSDIQMT |
| | | QSPSSLSASVGDRVTITCKASQNVGTNVGWYQQKPGKAPKALIYSASFRYSGVP |
| | | SRFSGSGSGTDFTLTISSLQPEDFATYYCQQYYTYPYTFGGGTKVEIKggggsggggs |
| | | ggggsggggsggggsggggsSGGPGPAGMKGLPGSEVQLVESGGGLVQPGNSLRLSCAA |
| | | SGFTFSKFGMSWVRQAPGKGLEWVSSISGSGRDTLYAESVKGRFTISRDNAKTT |
| | | LYLQMNSLRPEDTAVYYCTIGGSLSVSSQGTLVTVSSSGGPGPAGMKGLPGSapts |
| | | sstkktqlqlehllldlqmilnginnyknpkltrmltfkfympkkatelkhlqcleeelkpleevlnlaqsknfhlrprdlisnin |
| | | vivlelkgsettfmceyadetativeflnrwitfcqsiistltHHHHHH |
| 57 | ACP24 | EVQLVESGGGLVQPGGSLRLSCAASGFTFSSYTLAWVRQAPGKGLEWVAAIDSS |
| | (IL2 | SYTYSPDTVRGRFTISRDNAKNSLYLQMNSLRAEDTAVYYCARDSNWDALDYW |
| | fusion | GQGTTVTVSSGGGGSGGGGSGGGGSDIQMTQSPSSLSASVGDRVTITCKASQNV |
| | protein) | GTNVGWYQQKPGKAPKALIYSASFRYSGVPSRFSGSGSGTDFTLTISSLQPEDFA |
| | | TYYCQQYYTYPYTFGGGTKVEIKSGGPGPAGMKGLPGSaptssstkktqlqlehllldlqmiln |
| | | ginnyknpkltrmltfkfympkkatelkhlqcleeelkpleevlnlaqsknfhlrprdlisninvivlelkgsettfmceyade |
| | | tativeflnrwitfcqsiistltHHHHHH |
| 58 | ACP25 | EVQLVESGGGLVQPGGSLRLSCAASGFTFSSYTLAWVRQAPGKGLEWVAAIDSS |
| | (IL2 | SYTYSPDTVRGRFTISRDNAKNSLYLQMNSLRAEDTAVYYCARDSNWDALDYW |
| | fusion | GQGTTVTVSSGGGGSGGGGSGGGGSDIQMTQSPSSLSASVGDRVTITCKASQNV |
| | protein) | GTNVGWYQQKPGKAPKALIYSASFRYSGVPSRFSGSGSGTDFTLTISSLQPEDFA |
| | | TYYCQQYYTYPYTFGGGTKVEIKggggsggggsggggsggggsggggsggggsSGGPGPAGM |
| | | KGLPGSaptssstkktqlqlehllldlqmilnginnyknpkltrmltfkfympkkatelkhlqcleeelkpleevlnlaqsk |
| | | nfhlrprdlisninvivlelkgsettfmceyadetativeflnrwitfcqsiistltHHHHHH |
| 59 | ACP26 | QVQLQESGGGLVQAGGSLRLSCAASGRIFSIDIMSWYRQAPGKQRELVARITRG |
| | (IL2 | GTISYDDSVKGRFTISRDNAKNTVYLQMNSLKPEDTGVYYCNALYGTDYWGKG |
| | fusion | TQVTVSSggggsggggsggggsaptssstkktqlqlehllldlqmilnginnyknpkltrmltfkfympkkatelkhlq |
| | protein) | cleeelkpleevlnlaqsknfhlrprdlisninvivlelkgsettfmceyadetativeflnrwitfcqsiistltSGGPGPAG |
| | | MKGLPGSEVQLVESGGGLVQPGNSLRLSCAASGFTFSKFGMSWVRQAPGKGLE |
| | | WVSSISGSGRDTLYAESVKGRFTISRDNAKTTLYLQMNSLRPEDTAVYYCTIGGS |
| | | LSVSSQGTLVTVSSggggsggggsggggsggggsQVQLQQSGAELVRPGTSVKVSCKASG |
| | | YAFTNYLIEWVKQRPGQGLEWIGVINPGSGGTNYNEKFKGKATLTADKSSSTAY |
| | | MQLSSLTSDDSAVYFCARWRGDGYYAYFDVWGAGTTVTVSSggggsggggsggggs |
| | | DIVLTQSPASLAVSLGQRATISCKASQSVDYDGDSYMNWYQQKPGQPPKLLIYA |
| | | ASNLESGIPARFSGSGSGTDFTLNIHPVEEEDAATYYCQQSNEDPYTFGGGTKLEI |
| | | KHHHHHHEPEA |
| 60 | ACP27 | QVQLQESGGGLVQAGGSLRLSCAASGRIFSIDIMSWYRQAPGKQRELVARITRG |
| | (IL2 | GTISYDDSVKGRFTISRDNAKNTVYLQMNSLKPEDTGVYYCNALYGTDYWGKG |
| | fusion | TQVTVSSggggsggggsggggsaptssstkktqlqlehllldlqmilnginnyknpkltrmltfkfympkkatelkhlq |
| | protein) | cleeelkpleevlnlaqsknfhlrprdlisninvivlelkgsettfmceyadetativeflnrwitfcqsiistltSGGPGPAG |
| | | MKGLPGSEVQLVESGGGLVQPGNSLRLSCAASGFTFSKFGMSWVRQAPGKGLE |
| | | WVSSISGSGRDTLYAESVKGRFTISRDNAKTTLYLQMNSLRPEDTAVYYCTIGGS |
| | | LSVSSQGTLVTVSSggggsggggsggggsggggsDIVLTQSPASLAVSLGQRATISCKASQ |
| | | SVDYDGDSYMNWYQQKPGQPPKLLIYAASNLESGIPARFSGSGSGTDFTLNIHPV |
| | | EEEDAATYYCQQSNEDPYTFGGGTKLEIKggggsggggsggggsQVQLQQSGAELVRP |
| | | GTSVKVSCKASGYAFTNYLIEWVKQRPGQGLEWIGVINPGSGGTNYNEKFKGK |
| | | ATLTADKSSSTAYMQLSSLTSDDSAVYFCARWRGDGYYAYFDVWGAGTTVTV |
| | | SSHHHHHHEPEA |
| 61 | ACP28 | aptssstkktqlqlehllldlqmilnginnyknpkltrmltfkfympkkatelkhlqcleeelkpleevlnlaqsknfhlrprdli |
| | (IL2 | sninvivlelkgsettfmceyadetativeflnrwitfcqsiistltSGGPGPAGMKGLPGSggggsggggsggggs |
| | fusion | ggggsggggsQVQLQQSGAELVRPGTSVKVSCKASGYAFTNYLIEWVKQRPGQGLE |
| | protein) | WIGVINPGSGGTNYNEKFKGKATLTADKSSSTAYMQLSSLTSDDSAVYFCARWR |
| | | GDGYYAYFDVWGAGTTVTVSSggggsggggsggggsDIVLTQSPASLAVSLGQRATIS |
| | | CKASQSVDYDGDSYMNWYQQKPGQPPKLLIYAASNLESGIPARFSGSGSGTDFT |
| | | LNIHPVEEEDAATYYCQQSNEDPYTFGGGTKLEIKggggsggggsggggsEVQLVESGG |
| | | GLVQPGNSLRLSCAASGFTFSKFGMSWVRQAPGKGLEWVSSISGSGRDTLYAES |
| | | VKGRFTISRDNAKTTLYLQMNSLRPEDTAVYYCTIGGSLSVSSQGTLVTVSSgggg |
| | | sggggsggggsQVQLQESGGGLVQAGGSLRLSCAASGRIFSIDIMSWYRQAPGKQRE |
| | | LVARITRGGTISYDDSVKGRFTISRDNAKNTVYLQMNSLKPEDTGVYYCNALYG |
| | | TDYWGKGTQVTVSSHHHHHHEPEA |
| 62 | ACP29 | aptssstkktqlqlehllldlqmilnginnyknpkltrmltfkfympkkatelkhlqcleeelkpleevlnlaqsknfhlrprdli |
| | (IL2 | sninvivlelkgsettfmceyadetativeflnrwitfcqsiistltSGGPGPAGMKGLPGSggggsggggsggggs |
| | fusion | ggggsggggsDIVLTQSPASLAVSLGQRATISCKASQSVDYDGDSYMNWYQQKPGQ |
| | protein) | PPKLLIYAASNLESGIPARFSGSGSGTDFTLNIHPVEEEDAATYYCQQSNEDPYTF |
| | | GGGTKLEIKggggsggggsggggsQVQLQQSGAELVRPGTSVKVSCKASGYAFTNYLI |
| | | EWVKQRPGQGLEWIGVINPGSGGTNYNEKFKGKATLTADKSSSTAYMQLSSLTS |
| | | DDSAVYFCARWRGDGYYAYFDVWGAGTTVTVSSggggsggggsggggsEVQLVESG |
| | | GGLVQPGNSLRLSCAASGFTFSKFGMSWVRQAPGKGLEWVSSISGSGRDTLYAE |
| | | SVKGRFTISRDNAKTTLYLQMNSLRPEDTAVYYCTIGGSLSVSSQGTLVTVSSggg |
| | | gsggggsggggsQVQLQESGGGLVQAGGSLRLSCAASGRIFSIDIMSWYRQAPGKQR |
| | | ELVARITRGGTISYDDSVKGRFTISRDNAKNTVYLQMNSLKPEDTGVYYCNALY |
| | | GTDYWGKGTQVTVSSHHHHHHEPEA |
| 63 | IL2Ra | 10 20 30 40 50 |
| | | MDSYLLMWGL LTFIMVPGCQ AELCDDDPPE IPHATFKAMA YKEGTMLNCE |
| | | 60 70 80 90 100 |
| | | CKRGFRRIKS GSLYMLCTGN SSHSSWDNQC QCTSSATRNT TKQVTPQPEE |
| | | 110 120 130 140 150 |
| | | QKERKTTEMQ SPMQPVDQAS LPGHCREPPP WENEATERIY HFVVGQMVYY |
| | | 160 170 180 190 200 |
| | | QCVQGYRALH RGPAESVCKM THGKTRWTQP QLICTGEMET SQFPGEEKPQ |
| | | 210 220 230 240 250 |
| | | ASPEGRPESE TSCLVTTTDF QIQTEMAATM ETSIFTTEYQ VAVAGCVFLL |
| | | 260 270 |
| | | ISVLLLSGLT WQRRQRKSRR TI |
| 64 | IL2Rb | 10 20 30 40 50 |
| | | MAAPALSWRL PLLILLLPLA TSWASAAVNG TSQFTCFYNS RANISCVWSQ |
| | | 60 70 80 90 100 |
| | | DGALQDTSCQ VHAWPDRRRW NQTCELLPVS QASWACNLIL GAPDSQKLTT |
| | | 110 120 130 140 150 |
| | | VDIVTLRVLC REGVRWRVMA IQDFKPFENL RLMAPISLQV VHVETHRCNI |
| | | 160 170 180 190 200 |
| | | SWEISQASHY FERHLEFEAR TLSPGHTWEE APLLTLKQKQ EWICLETLTP |
| | | 210 220 230 240 250 |
| | | DTQYEFQVRV KPLQGEFTTW SPWSQPLAFR TKPAALGKDT IPWLGHLLVG |
| | | 260 270 280 290 300 |
| | | LSGAFGFIIL VYLLINCRNT GPWLKKVLKC NTPDPSKFFS QLSSEHGGDV |
| | | 310 320 330 340 350 |
| | | QKWLSSPFPS SSFSPGGLAP EISPLEVLER DKVTQLLLQQ DKVPEPASLS |
| | | 360 370 380 390 400 |
| | | SNHSLTSCFT NQGYFFFHLP DALEIEACQV YFTYDPYSEE DPDEGVAGAP |
| | | 410 420 430 440 450 |
| | | TGSSPQPLQP LSGEDDAYCT FPSRDDLLLF SPSLLGGPSP PSTAPGGSGA |
| | | 460 470 480 490 500 |
| | | GEERMPPSLQ ERVPRDWDPQ PLGPPTPGVP DLVDFQPPPE LVLREAGEEV |
| | | 510 520 530 540 550 |
| | | PDAGPREGVS FPWSRPPGQG EFRALNARLP LNTDAYLSLQ ELQGQDPTHL |
| | | V |
| 65 | IL2Rg | 10 20 30 40 50 |
| | | MLKPSLPFTS LLFLQLPLLG VGLNTTILTP NGNEDTTADF FLTTMPTDSL |
| | | 60 70 80 90 100 |
| | | SVSTLPLPEV QCFVFNVEYM NCTWNSSSEP QPTNLTLHYW YKNSDNDKVQ |
| | | 110 120 130 140 150 |
| | | KCSHYLFSEE ITSGCQLQKK EIHLYQTFVV QLQDPREPRR QATQMLKLQN |
| | | 160 170 180 190 200 |
| | | LVIPWAPENL TLHKLSESQL ELNWNNRFLN HCLEHLVQYR TDWDHSWTEQ |
| | | 210 220 230 240 250 |
| | | SVDYRHKFSL PSVDGQKRYT FRVRSRFNPL CGSAQHWSEW SHPIHWGSNT |
| | | 260 270 280 290 300 |
| | | SKENPFLFAL EAVVISVGSM GLIISLLCVY FWLERTMPRI PTLKNLEDLV |
| | | 310 320 330 340 350 |
| | | TEYHGNFSAW SGVSKGLAES LQPDYSERLC LVSEIPPKGG ALGEGPGASP |
| | | 360 |
| | | CNQHSPYWAP PCYTLKPET |
| 66 | ACP04 | iwelkkdvyvveldwypdapgemvvltcdtpeedgitwtldqssevlgsgktliqvkefgdagqytchkggevlshslll |
| | (human | lhkkedgiwstdilkdqkepknktflrceaknysgrftcwwlttistdltfsvkssrgssdpqgvtcgaatlsaervrgdnkey |
| | p40/murine | eysvecqedsacpaaeeslpievmvdavhklkyenytssffirdiikpdppknlqlkplknsrqvevsweypdtwstphs |
| | p35 | yfsltfcvqvqgkskrekkdrvftdktsatvicrknasisvraqdryyssswsewasvpcsggggsggggsggggsrvipv |
| | IL12 | sgparclsqsrnllkttddmvktareklkhysctaedidheditrdqtstlktclplelhknesclatretssttrgsclppqktslm |
| | fusion | mtlclgsiyedlkmyqtefqainaalqnhnhqqiildkgmlvaidelmqslnhngetlrqkppvgeadpyrvkmklcillh |
| | protein) | afstrvvtinrymgylssaHHHHHH |
| 67 | ACP05 | iwelkkdvyvveldwypdapgemvvltcdtpeedgitwtldqssevlgsgktltiqvkefgdagqytchkggevlshslll |
| | (human | lhkkedgiwstdilkdqkepknktflrceaknysgrftcwwlttistdltsvkssrgssdpqgvtcgaatlsaervrgdnkey |
| | p40/murine | eysvecqedsacpaaeeslpievmvdavhklkyenytssffirdiikpdppknlqlkplknsrqvevsweypdtwstphs |
| | p35 | yfsltfcvqvqgkskrekkdrvftdktsatvicrknasisvraqdryyssswsewasvpcsggggsggggsggggsrnlpv |
| | IL12 | atpdpgmfpclhhsqnllravsnmlqkarqtlefypctseeidheditkdktstveaclpleltknesclnsretsfitngsclas |
| | fusion | rktsfmmalclssiyedlkmyqvefktmnakllmdpkrqifldqnmlavidelmqalnfnsetypqkssleepdfyktki |
| | protein) | klcillhafriravtidrvmsylnasHHHHHH |
| 68 | ACP06 | QSVLTQPPSVSGAPGQRVTISCSGSRSNIGSNTVKWYQQLPGTAPKLLIYYNDQR |
| | (human | PSGVPDRFSGSKSGTSASLAITGLQAEDEADYYCQSYDRYTHPALLFGTGTKVT |
| | p40/murine | VLggggsggggsggggsQVQLVESGGGVVQPGRSLRLSCAASGFTFSSYGMHWVRQA |
| | p35 | PGKGLEWVAFIRYDGSNKYYADSVKGRFTISRDNSKNTLYLQMNSLRAEDTAV |
| | IL12 | YYCKTHGSHDNWGQGTMVTVSSggggsggggsggggsggggsggggsggggsSGGPGPAG |
| | fusion | MKGLPGSiwelkkdvyvveldwypdapgemvvltcdtpeedgitwtldqssevlgsgktltiqvkefgdagqytch |
| | protein) | kggevlshsllllhkkedgiwstdilkdqkepknktflrceaknysgrftcwwlttistdltfsvkssrgssdpqgvtcgaatls |
| | | aervrgdnkeyeysvecqedsacpaaeeslpievmvdavhklkyenytssffirdiikpdppknlqlkplknsrqvevsw |
| | | eypdtwstphsyfsltfcvqvqgkskrekkdrvftdktsatvicrknasisvraqdryyssswsewasvpcsggggsgggg |
| | | sggggsrvipvsgparclsqsmllkttddmvktareklkhysctaedidheditrdqtstlktclplelhknesclatretssttr |
| | | gsclppqktslmmtlclgsiyedlkmyqtefqainaalqnhnhqqiildkgmlvaidelmqslnhngetlrqkppvgead |
| | | pyrvkmklcillhafstrvvtinrvmgylssaSGGPGPAGMKGLPGSEVQLVESGGGLVQPGNSL |
| | | RLSCAASGFTFSKFGMSWVRQAPGKGLEWVSSISGSGRDTLYAESVKGRFTISR |
| | | DNAKTTLYLQMNSLRPEDTAVYYCTIGGSLSVSSQGTLVTVSSHHHHHHEPEA |
| 69 | ACP07 | QSVLTQPPSVSGAPGQRVTISCSGSRSNIGSNTVKWYQQLPGTAPKLLIYYNDQR |
| | (human | PSGVPDRFSGSKSGTSASLAITGLQAEDEADYYCQSYDRYTHPALLFGTGTKVT |
| | p40/murine | VLggggsggggsggggsQVQLVESGGGVVQPGRSLRLSCAASGFTFSSYGMHWVRQA |
| | p35 | PGKGLEWVAFIRYDGSNKYYADSVKGRFTISRDNSKNTLYLQMNSLRAEDTAV |
| | IL12 | YYCKTHGSHDNWGQGTMVTVSSggggsggggsggggsggggsggggsggggsSGGPGPAG |
| | fusion | MKGLPGSiwelkkdvyvveldwypdapgemvvltcdtpeedgitwtldqssevlgsgktltiqvkefgdagqytch |
| | protein) | kggevlshsllllhkkedgiwstdilkdqkepknktflrceaknysgrftcwwlttistdltfsvkssrgssdpqgvtcgaatls |
| | | aervrgdnkeyeysvecqedsacpaaeeslpievmvdavhklkyenytssffirdiikpdppknlqlkplknsrqvevsw |
| | | eypdtwstphsyfsltfcvqvqgkskrekkdrvftdktsatvicrknasisvraqdryyssswsewasvpcsggggsgggg |
| | | sggggsrvipvsgparclsqsrnllkttddmvktareklkhysctaedidheditrdqtstlktclplelhknesclatretssttr |
| | | gsclppqktslmmtlclgsiyedlkmyqtefqainaalqnhnhqqiildkgmlvaidelmqslnhngetlrqkppvgead |
| | | pyrvkmklcillhafstrvvtinrvmgylssaSGGPGPAGMKGLPGSEVQLVESGGGLVQPGNSL |
| | | RLSCAASGFTFSKFGMSWVRQAPGKGLEWVSSISGSGRDTLYAESVKGRFTISR |
| | | DNAKTTLYLQMNSLRPEDTAVYYCTIGGSLSVSSQGTLVTVSSggggsggggsggggs |
| | | QVQLQESGGGLAQAGGSLSLSCAASGFTVSNSVMAWYRQTPGKQREFVAIINSV |
| | | GSTNYADSVKGRFTISRDNAKNTVYLQMNNLKPEDTAVYVCNRNFDRIYWGQG |
| | | TQVTVSSHHHHHHEPEA |
| 70 | ACP08 | QVQLQESGGGLAQAGGSLSLSCAASGFTVSNSVMAWYRQTPGKQREFVAIINSV |
| | (human | GSTNYADSVKGRFTISRDNAKNTVYLQMNNLKPEDTAVYVCNRNFDRIYWGQG |
| | p40/murine | TQVTVSSggggsggggsggggsQSVLTQPPSVSGAPGQRVTISCSGSRSNIGSNTVKWY |
| | p35 | QQLPGTAPKLLIYYNDQRPSGVPDRFSGSKSGTSASLAITGLQAEDEADYYCQSY |
| | IL12 | DRYTHPALLFGTGTKVTVLggggsggggsggggsQVQLVESGGGVVQPGRSLRLSCAA |
| | fusion | SGFTFSSYGMHWVRQAPGKGLEWVAFIRYDGSNKYYADSVKGRFTISRDNSKN |
| | protein) | TLYLQMNSLRAEDTAVYYCKTHGSHDNWGQGTMVTVSSggggsggggsggggsggggs |
| | | ggggsggggsSGGPGPAGMKGLPGSiwelkkdvyvveldwypdapgemvvltcdtpeedgitwtldqsse |
| | | vlgsgktltiqvkefgdagqytchkggevlshsllllhkkedgiwstdilkdqkepknktflrceaknysgrftcwwlttistdl |
| | | tfsvkssrgssdpqgvtcgaatlsaervrgdnkeyeysvecqedsacpaaeeslpievmvdavhklkyenytssffirdiik |
| | | pdppknlqlkplknsrqvevsweypdtwstphsyfsltfcvqvqgkskrekkdrvftdktsatvicrknasisvraqdryys |
| | | sswsewasvpcsggggsggggsggggsrvipvsgparclsqsrnllkttddmvktareklkhysctaedidheditrdqtst |
| | | lktclplelhknesclatretssttrgsclppqktslmmtlclgsiyedlkmyqtefqainaalqnhnhqqiildkgmlvaidel |
| | | mqslnhngetlrqkppvgeadpyrvkmklcillhafstrvvtinrvmgylssaSGGPGPAGMKGLPGSEVQ |
| | | LVESGGGLVQPGNSLRLSCAASGFTFSKFGMSWVRQAPGKGLEWVSSISGSGRD |
| | | TLYAESVKGRFTISRDNAKTTLYLQMNSLRPEDTAVYYCTIGGSLSVSSQGTLVT |
| | | VSSHHHHHHEPEA |
| 71 | ACP09 | EVQLVESGGGLVQPGNSLRLSCAASGFTFSKFGMSWVRQAPGKGLEWVSSISGS |
| | (human | GRDTLYAESVKGRFTISRDNAKTTLYLQMNSLRPEDTAVYYCTIGGSLSVSSQGT |
| | p40/murine | LVTVSSggggsggggsggggsQSVLTQPPSVSGAPGQRVTISCSGSRSNIGSNTVKWYQ |
| | p35 | QLPGTAPKLLIYYNDQRPSGVPDRFSGSKSGTSASLAITGLQAEDEADYYCQSYD |
| | IL12 | RYTHPALLFGTGTKVTVLggggsggggsggggsQVQLVESGGGVVQPGRSLRLSCAAS |
| | fusion | GFTFSSYGMHWVRQAPGKGLEWVAFIRYDGSNKYYADSVKGRFTISRDNSKNT |
| | protein) | LYLQMNSLRAEDTAVYYCKTHGSHDNWGQGTMVTVSSggggsggggsggggsggggsg |
| | | gggsggggsSGGPGPAGMKGLPGSiwelkkdvyvveldwypdapgemvvltcdtpeedgitwtldqssevl |
| | | gsgktltiqvkefgdagqytchkggevlshsllllhkkedgiwstdilkdqkepknktflrceaknysgrftcwwlttistdltf |
| | | svkssrgssdpqgvtcgaatlsaervrgdnkeyeysvecqedsacpaaeeslpievmvdavhklkyenytssffirdiikpd |
| | | ppknlqlkplknsrqvevsweypdtwstphsyfsltfcvqvqgkskrekkdrvftdktsatvicrknasisvraqdryysss |
| | | wsewasvpcsggggsggggsggggsrvipvsgparclsqsrnllkttddmvktareklkhysctaedidheditrdqtstlk |
| | | tclplelhknesclatretssttrgsclppqktslmmtlclgsiyedlkmyqtefqainaalqnhnhqqiildkgmlvaidelm |
| | | qslnhngetlrqkppvgeadpyrvkmklcillhafstrvvtinrvmgylssaHHHHHHEPEA |
| 72 | ACP10 | EVQLVESGGGLVQPGNSLRLSCAASGFTFSKFGMSWVRQAPGKGLEWVSSISGS |
| | (human | GRDTLYAESVKGRFTISRDNAKTTLYLQMNSLRPEDTAVYYCTIGGSLSVSSQGT |
| | p40/murine | LVTVSSSGGPGPAGMKGLPGSiwelkkdvyvveldwypdapgemvvltcdtpeedgitwtldqssevlg |
| | p35 | sgktltiqvkefgdagqytchkggevlshsllllhkkedgiwstdilkdqkepknktflrceaknysgrftcwwlttistdltfs |
| | IL12 | vkssrgssdpqgvtcgaatlsaervrgdnkeyeysvecqedsacpaaeeslpievmvdavhklkyenytssffirdiikpd |
| | fusion | ppknlqlkplknsrqvevsweypdtwstphsyfsltfcvqvqgkskrekkdrvftdktsatvicrknasisvraqdryysss |
| | protein) | wsewasvpcsggggsggggsggggsrvipvsgparclsqsrnllkttddmvktareklkhysctaedidheditrdqtstlk |
| | | tclplelhknesclatretssttrgsclppqktslmmtlclgsiyedlkmyqtefqainaalqnhnhqqiildkgmlvaidelm |
| | | qslnhngetlrqkppvgeadpyrvkmklcillhafstrvvtinrvmgylssaSGGPGPAGMKGLPGSggggsg |
| | | gggsggggsggggsggggsggggsQSVLTQPPSVSGAPGQRVTISCSGSRSNIGSNTVKWY |
| | | QQLPGTAPKLLIYYNDQRPSGVPDRFSGSKSGTSASLAITGLQAEDEADYYCQSY |
| | | DRYTHPALLFGTGTKVTVLggggsggggsggggsQVQLVESGGGVVQPGRSLRLSCAA |
| | | SGFTFSSYGMHWVRQAPGKGLEWVAFIRYDGSNKYYADSVKGRFTISRDNSKN |
| | | TLYLQMNSLRAEDTAVYYCKTHGSHDNWGQGTMVTVSSHHHHHHEPEA |
| 73 | ACP11 | iwelkkdvyvveldwypdapgemvvltcdtpeedgitwtldqssevlgsgktltiqvkefgdagqytchkggevlshslll |
| | (human | lhkkedgiwstdilkdqkepknktftlrceaknysgrftcwwlttistdltfsvkssrgssdpqgvtcgaatlsaervrgdnkey |
| | p40/murine | eysvecqedsacpaaeeslpievmvdavhklkyenytssffirdiikpdppknlqlkplknsrqvevsweypdtwstphs |
| | p35 | yfsltfcvqvqgkskrekkdrvftdktsatvicrknasisvraqdryyssswsewasvpcsggggsggggsggggsrvipv |
| | IL12 | sgparclsqsrnllkttddmvktareklkhysctaedidheditrdqtstlktclplelhknesclatretssttrgsclppqktslm |
| | fusion | mtlclgsiyedlkmyqtefqainaalqnhnhqqiildkgmlvaidelmqslnhngetlrqkppvgeadpyrvkmklcillh |
| | protein) | afstryvtinrvmgylssaSGGPGPAGMKGLPGSggggsggggsggggsggggsggggsggggsQSVLT |
| | | QPPSVSGAPGQRVTISCSGSRSNIGSNTVKWYQQLPGTAPKWYYNDQRPSGVP |
| | | DRFSGSKSGTSASLAITGLQAEDEADYYCQSYDRYTHPALLFGTGTKVTVLggggs |
| | | ggggsggggsQVQLVESGGGVVQPGRSLRLSCAASGFTFSSYGMHWVRQAPGKGLE |
| | | WVAFIRYDGSNKYYADSVKGRFTISRDNSKNTLYLQMNSLRAEDTAVYYCKTH |
| | | GSHDNWGQGTMVTVSSggggsggggsggggsEVQLVESGGGLVQPGNSLRLSCAASG |
| | | FTFSKFGMSWVRQAPGKGLEWVSSISGSGRDTLYAESVKGRFTISRDNAKTTLY |
| | | LQMNSLRPEDTAVYYCTIGGSLSVSSQGTLVTVSSHEIREIHHEPEA |
| 74 | IL12 p40 | 10 20 30 40 50 |
| | human | MCHQQLVISW FSLVFLASPL VAIWELKKDY YVVELDWYPD APGEMVVLTC |
| | (Uniprot | 60 70 80 90 100 |
| | Accession | DTPEEDGITW TLDQSSEVLG SGKTLTIQVK EFGDAGQYTC HKGGEVLSHS |
| | No. | 110 120 130 140 150 |
| | P29460) | LLLLHKKEDG IWSTDILKDQ KEPKNKTFLR CEAKNYSGRF TCWWLTTIST |
| | | 160 170 180 190 200 |
| | | DLTFSVKSSR GSSDPQGVTC GAATLSAERV RGDNKEYEYS VECQEDSACP |
| | | 210 220 230 240 250 |
| | | AAEESLPIEV MVDAVHKLKY ENYTSSFFIR DIIKPDPPKN LQLKPLKNSR |
| | | 260 270 280 290 300 |
| | | QVEVSWEYPD TWSTPHSYFS LTFCVQVQGK SKREKKDRVF TDKTSATVIC |
| | | 310 320 |
| | | RKNASISVRA QDRYYSSSWS EWASVPCS |
| 75 | IL12 p35 | 10 20 30 40 50 |
| | mouse | MCQSRYLLFL ATLALLNHLS LARVIPVSGP ARCLSQSRNL LKTTDDMVKT |
| | (Uniprot | 60 70 80 90 100 |
| | Accession | AREKLKHYSC TAEDIDHEDI TRDQTSTLKT CLPLELHKNE SCLATRETSS |
| | No. | 110 120 130 140 150 |
| | P43431) | TTRGSCLPPQ KTSLMMTLCL GSIYEDLKMY QTEFQAINAA LQNHNHQQII |
| | | 160 170 180 190 200 |
| | | LDKGMLVAID ELMQSLNHNG ETLRQKPPVG EADPYRVKMK LCILLHAFST |
| | | 210 |
| | | RVVTINRVMG YLSSA |
| 76 | IL12Rb- | 10 20 30 40 50 |
| | 2 | [symbol] [symbol] [symbol] [symbol] [symbol] |
| | | 60 70 80 90 100 |
| | | [symbol] [symbol] [symbol] [symbol] [symbol] |
| | | 110 120 130 140 150 |
| | | [symbol] [symbol] [symbol] [symbol] [symbol] |
| | | 160 170 180 190 200 |
| | | [symbol] [symbol] [symbol] [symbol] [symbol] |
| | | 210 220 230 240 250 |
| | | [symbol] [symbol] [symbol] [symbol] [symbol] |
| | | 260 270 280 290 300 |
| | | [symbol] [symbol] [symbol] [symbol] [symbol] |
| | | 310 320 330 340 350 |
| | | [symbol] [symbol] [symbol] [symbol] [symbol] |
| | | 360 370 380 390 400 |
| | | [symbol] [symbol] [symbol] [symbol] [symbol] |
| | | 410 420 430 440 450 |
| | | [symbol] [symbol] [symbol] [symbol] [symbol] |
| | | 460 470 480 490 500 |
| | | [symbol] [symbol] [symbol] [symbol] [symbol] |
| | | 510 520 530 540 550 |
| | | [symbol] [symbol] [symbol] [symbol] [symbol] |
| | | 560 570 580 590 600 |
| | | [symbol] [symbol] [symbol] [symbol] [symbol] |
| | | 610 620 630 640 650 |
| | | [symbol] [symbol] [symbol] [symbol] [symbol] |
| | | 660 670 680 690 700 |
| | | [symbol] [symbol] [symbol] [symbol] [symbol] |
| | | 710 720 730 740 750 |
| | | [symbol] [symbol] [symbol] [symbol] [symbol] |
| | | 760 770 780 790 800 |
| | | [symbol] [symbol] [symbol] [symbol] [symbol] |
| | | 810 820 830 840 850 |
| | | [symbol] [symbol] [symbol] [symbol] [symbol] |
| | | 860 |
| | | [symbol] ML |
| 77 | IL12Rb- | 10 20 30 40 50 |
| | 1 | MEPLVTWVVP LLFLFLLSRQ GAACRISECC FQDPPYPDAD SGSASGPRDL |
| | | 60 70 80 90 100 |
| | | RCYRISSDRY ECSWQYEGPT AGVSHFLRCC LSSGRCCYFA AGSATRLQFS |
| | | 110 120 130 140 150 |
| | | DQAGVSVLYT VTLWVESWAR NQTEKSPEVT LQLYNSVKYE PPLGDIKVSK |
| | | 160 170 180 190 200 |
| | | LAGQLRMEWE TPDNQVGAEV QFRHRIPSSP WKLGDCGPQD DDTESCLCPL |
| | | 210 220 230 240 250 |
| | | EMNVAQEFQL RRRQLGSQGS SWSKWSSPVC VPPENPPQPQ VRFSVEQLGQ |
| | | 260 270 280 290 300 |
| | | DGRRRLILKE QPTQLELPEG CQGLAPGTEV TYRLQLHMLS CPCKAKATRT |
| | | 310 320 330 340 350 |
| | | LHLGKMPYLS GAAYNVAVIS SNQFGPGLNQ TWHTPADTHT EPVALNISVG |
| | | 360 370 380 390 400 |
| | | INGTTMYWPA RAQSMTYCIE WQPVGQDGGL ATCSLTAPQD PDPAGMATYS |
| | | 410 420 430 440 450 |
| | | WSRESGAMGQ EKCYYITIFA SAHPEKLTLW STVLSTYHFG GNASAAGTPH |
| | | 460 470 480 490 500 |
| | | HVSVKNHSLD SVSVDWAPSL LSTCPGVLKE YVVRCRDEDS KQVSEHPVQP |
| | | 510 520 530 540 550 |
| | | TETQVTLSGL RAGVYTVQV RADTAWLRGV WSQPQRFSIE VQVSDWLIFF |
| | | 560 570 580 590 600 |
| | | ASLGSFLSIL LVGVLGYLGL NRAARHLCPP LPTPCASSAI EFPGGKETWQ |
| | | 610 620 630 640 650 |
| | | WINPVDFQEE ASLQEALVVE MSWDKGERTE PLEKTELPEG APELALDTEL |
| | | 660 |
| | | SLEDGDRCKA KM |
| 78 | IL-12 | 10 20 30 40 50 |
| | p35 | MCHQQLVISW FSLVFLASPL VAIWELKKDV YVVELDWYPD APGEMVVLTC |
| | human | 60 70 80 90 100 |
| | (Uniprot | DTPEEDGITW TLDQSSEVLG SGKTLTIQVK EFGDAGQYTC HKGGEVLSHS |
| | accession | 110 120 130 140 150 |
| | no. | LLLLHKKEDG IWSTDILKDQ KEPKNKTFLR CEAKNYSGRF TCWWLTTIST |
| | P29459) | 160 170 180 190 200 |
| | | DLTFSVKSSR GSSDPQGVTC GAATLSAERV RGDNKEYEYS VECQEDSACP |
| | | 210 220 230 240 250 |
| | | AAEESLPIEV MVDAVHKLKY ENYTSSFFIR DIIKPDPPKN LQLKPLKNSR |
| | | 260 270 280 290 300 |
| | | QVEVSWEYPD TWSTPHSYFS LTFCVQVQGK SKREKKDRVF TDKTSATVIC |
| | | 310 320 330 |
| | | RKNASISVRA QDRYYSSSWS EWASVPCS |
| 79 | IL-12 | 10 20 30 40 50 |
| | p40 | MCPQKLTISW FAIVLLVSPL MAMWELEKDV YVVEVDWTPD APGETVNLTC |
| | mouse | 60 70 80 90 100 |
| | (Uniprot | DTPEEDGITW TSDQRHGVIG SGKTLTITVK EFLDAGQYTC HKGGETLSHS |
| | accession | 110 120 130 140 150 |
| | no. | HLLLHKKENG IWSTEILKNF KNKTFLKCEA PNYSGRFTCS WLVQRNMDLK |
| | P43432) | 160 170 180 190 200 |
| | | FNIKSSSSSP DSRAVTCGMA SLSAEKVTLD QRDYEKYSVS CQEDVTCPTA |
| | | 210 220 230 240 250 |
| | | EETLPIELAL EARQQNKYEN YSTSFFIRDI IKPDPPKNLQ MKPLKNSQVE |
| | | 260 270 280 290 300 |
| | | VSWEYPDSWS TPHSYFSLKF FVRIQRKKEK MKETEEGCNQ KGAFLVEKTS |
| | | 310 320 330 |
| | | TEVQCKGGNV CVQAQDRYYN SSCSKWACVP CRVRS |
| 80 | ACP01 | EVQLVESGGGLVQPGNSLRLSCAASGFTFSKFGMSWVRQAPGKGLEWVSSISGS |
| | (mouse | GRDTLYAESVKGRFTISRDNAKTTLYLQMNSLRPEDTAVYYCTIGGSLSVSSQGT |
| | IFNg | LVTVSSSGGPGPAGMKGLPGShgtviesleslnnyfnssgidveekslfldiwrnwqkdgdmkilqsqiisf |
| | fusion | ylrlfevlkdnqaisnnisvieshlittffsnskakkdafmsiakfevnnpqvqrqafnelirvvhqllpesslrkrkrsrcSG |
| | protein) | GPGPAGMKGLPGSEVQLVESGGGLVQPGNSLRLSCAASGFTFSKFGMSWVRQA |
| | | PGKGLEWVSSISGSGRDTLYAESVKGRFTISRDNAKTTLYLQMNSLRPEDTAVY |
| | | YCTIGGSLSVSSQGTLVTVSSHHHHHH |
| 81 | ACP02 | EVQLVESGGGLVQPGNSLRLSCAASGFTFSKFGMSWVRQAPGKGLEWVSSISGS |
| | (mouse | GRDTLYAESVKGRFTISRDNAKTTLYLQMNSLRPEDTAVYYCTIGGSLSVSSQGT |
| | IFNg | LVTVSSSGGPGPAGMKGLPGShgtviesleslnnyfnssgidveekslfldiwrnwqkdgdmkilqsqiisf |
| | fusion | ylrlfevlkdnqaisnnisvieshlittffsnskakkdafmsiakfevnnpqvqrqafnelirvvhqllpesslrkrkrsrcSG |
| | protein) | GPGPAGMKGLPGShgtviesleslnnyfnssgidveekslfldiwrnwqkdgdmkilqsqiisfylrlfevlkdnq |
| | | aisnnisvieshlittffsnskakkdafmsiakfevnnpqvqrqafnelirvvhqllpesslrkrkrsrcSGGPGPAGM |
| | | KGLPGSEVQLVESGGGLVQPGNSLRLSCAASGFTFSKFGMSWVRQAPGKGLEW |
| | | VSSISGSGRDTLYAESVKGRFTISRDNAKTTLYLQMNSLRPEDTAVYYCTIGGSL |
| | | SVSSQGTLVTVSSHHHHHH |
| 82 | ACP03 | EVQLVESGGGLVQPGNSLRLSCAASGFTFSKFGMSWVRQAPGKGLEWVSSISGS |
| | (mouse | GRDTLYAESVKGRFTISRDNAKTTLYLQMNSLRPEDTAVYYCTIGGSLSVSSQGT |
| | IFNg | LVTVSSSGGPGPAGMKGLPGShgtviesleslnnyfnssgidveekslfldiwrnwqkdgdmkilqsqiisf |
| | fusion | ylrlfevlkdnqaisnnisvieshlittffsnskakkdafmsiakfevnnpqvqrqafnelirvvhqllpesslrkrkrsrcggg |
| | protein) | gsggggsggggshgtviesleslnnyfnssgidveekslfidiwrnwqkdgdmkilqsqiisfylrlfevlkdnqaisnnisv |
| | | ieshlittffsnskakkdafmsiakfevnnpqvqrqafnelirvvhqllpesslrkrkrsrcSGGPGPAGMKGLPGS |
| | | EVQLVESGGGLVQPGNSLRLSCAASGFTFSKFGMSWVRQAPGKGLEWVSSISGS |
| | | GRDTLYAESVKGRFTISRDNAKTTLYLQMNSLRPEDTAVYYCTIGGSLSVSSQGT |
| | | LVTVSSHHHHHH |
| 83 | Human | 10 20 30 40 50 |
| | IFN-g | MKYTSYILAF QLCIVLGSLG CYCQDPYVKE AENLKKYFNA GHSDVADNGT |
| | (Uniprot | 60 70 80 90 100 |
| | Accession | LFLGILKNWK EESDRKIMQS QIVSFYFKLF KNFKDDQSIQ KSVETIKEDM |
| | No. | 110 120 130 140 150 |
| | P01579) | NVKFFNSNKK KRDDFEKLTN YSVTDLNVQR KAIHELIQVM AELSPAAKTG |
| | | 160 |
| | | KRKRSQMLFR GRRASQ |
| 84 | Mouse | 10 20 30 40 50 |
| | IFN-g | MNATHCILAL QLFLMAVSGC YCHGTVIESL ESLNNYFNSS GIDVEEKSLF |
| | (Uniprot | 60 70 80 90 100 |
| | Accession | LDIWRNWQKD GDMKILQSQI ISFYLRLFEV LKDNQAISNN ISVIESHLIT |
| | No. | 110 120 130 140 150 |
| | P01580) | TFFSNSKAKK DAFMSIAKFE VNNPQVQRQA FNELIRVVHQ LLPESSLRKR |
| | | KRSRC |
| 85 | ACP30 | mdmrvpaqllgllllwlrgarcEVQLVESGGGLVQPGNSLRLSCAASGFTFSKFGMSWVRQ |
| | (mouse | APGKGLEWVSSISGSGRDTLYAESVKGRFTISRDNAKTTLYLQMNSLRPEDTAV |
| | IFNg | YYCTIGGSLSVSSQGTLVTVSSSGGPGPAGMKGLPGShgtviesleslnnyfnssgidveekslfl |
| | fusion | diwrnwqkdgdmkilqsqiisfylrlfevlkdnqaisnnisvieshlittffsnskakkdafmsiakfevnnpqvqrqafnel |
| | protein) | irvvhqllpesslrkrkrsrcSGGPGPAGMKGLPGSEVQLVESGGGLVQPGNSLRLSCAASG |
| | | FTFSKFGMSWVRQAPGKGLEWVSSISGSGRDTLYAESVKGRFTISRDNAKTTLY |
| | | LQMNSLRPEDTAVYYCTIGGSLSVSSQGTLVTVSSSGGPGPAGMKGLPGShgtvies |
| | | leslnnyfnssgidveekslfldiwrnwqkdgdmkilqsqiisfylrlfevlkdnqaisnnisvieshlittffsnskakkdaf |
| | | msiakfevnnpqvqrqafnelirvvhqllpesslrkrkrsrcSGGPGPAGMKGLPGSEVQLVESGGGL |
| | | VQPGNSLRLSCAASGFTFSKFGMSWVRQAPGKGLEWVSSISGSGRDTLYAESVK |
| | | GRFTISRDNAKTTLYLQMNSLRPEDTAVYYCTIGGSLSVSSQGTLVTVSSHHHHH |
| | | H |
| 86 | ACP31 | EVQLVESGGGLVQPGNSLRLSCAASGFTFSKFGMSWVRQAPGKGLEWVSSISGS |
| | (mouse | GRDTLYAESVKGRFTISRDNAKTTLYLQMNSLRPEDTAVYYCTIGGSLSVSSQGT |
| | IFNa1 | LVTVSSSGGPGPAGMKGLPGScdlpqthnlrnkraltllvqmrrlsplsclkdrkdfgfpqekvdaqqikka |
| | fusion | qaipvlseltqqilniftskdssaawnttlldsfcndlhqqlndlqgclmqqvgvqefpltqedallavrkyfhritvylrekkh |
| | protein) | spcawevvraevwralsssanvlgrlreekSGGPGPAGMKGLPGSEVQLVESGGGLVQPGNSLR |
| | | LSCAASGFTFSKFGMSWVRQAPGKGLEWVSSISGSGRDTLYAESVKGRFTISRD |
| | | NAKTTLYLQMNSLRPEDTAVYYCTIGGSLSVSSQGTLVTVSSHHHHHHEPEA |
| 87 | ACP32 | EVQLVESGGGLVQPGNSLRLSCAASGFTFSKFGMSWVRQAPGKGLEWVSSISGS |
| | (mouse | GRDTLYAESVKGRFTISRDNAKTTLYLQMNSLRPEDTAVYYCTIGGSLSVSSQGT |
| | IFNa1 | LVTVSSSGGPGPAGMKGLPGScdlpqthnlrnkraltllvqmttlsplsclkdrkdfgfpqekvdaqqikka |
| | fusion | qaipvlseltqqilniftskdssaawnttlldsfcndlhqqlndlqgclmqqvgvqefpltqedallavrkyfhritvylrekkh |
| | protein) | spcawevvraevwralsssanvSGGPGPAGMKGLPGSEVQLVESGGGLVQPGNSLRLSCA |
| | | ASGFTFSKFGMSWVRQAPGKGLEWVSSISGSGRDTLYAESVKGRFTISRDNAKT |
| | | TLYLQMNSLRPEDTAVYYCTIGGSLSVSSQGTLVTVSSHHHHHHEPEA |
| 88 | IFNgR1 | 10 20 30 40 50 |
| | | MALLFLLPLV MQGVSRAEMG TADLGPSSVP TPINVTIESY NMNPIVYWEY |
| | | 60 70 80 90 100 |
| | | QIMPQVPVFT VEVKNYGVKN SEWIDACINI SHHYCNISDH VGDPSNSLWV |
| | | 110 120 130 140 150 |
| | | RVKARVGQKE SAYAKSEEFA YCRDGKIGPP KLDIRKEEKQ IMIDIFHPSV |
| | | 160 170 180 190 200 |
| | | FVNGDEQEVD YDPEITCYIR VYNVYVRMNG SEIQYKILTQ KEDDCDEIQC |
| | | 210 220 230 240 250 |
| | | QLAIPVSSLN SQYCVSAEGV LHVWGVTTEK SKEVCITIFN SSIKGSLWIP |
| | | 260 270 280 290 300 |
| | | VVAALLLFLV LSLVFICFYI EKINPLKEKS IILPKSLISV VRSATLETKP |
| | | 310 320 330 340 350 |
| | | ESKYVSLITS YQPFSLEKEV VCEEPLSPAT VPGMHIEDNP GKVEHTEELS |
| | | 360 370 380 390 400 |
| | | SIIEVVTIEE NIPDVVPGSH LTPIERESSS PLSSNQSEPG SIALNSYHSR |
| | | 410 420 430 440 450 |
| | | NCSESDHSRN GPDTDSSCLE SHSSLSDSEP PPNNKGEIKT EGQELITVIK |
| | | 460 470 480 |
| | | APTSFGYDKP HVLVDLLVDD SGKESLIGYR PTEDSKEFS |
| 89 | IFNgR2 | 10 20 30 40 50 |
| | | MRPTLLWSLL LLLGVFAAAA AAPPDPLSQL PAPQHPKIRL YNAEQVLSWE |
| | | 60 70 80 90 100 |
| | | PVALSNSTRP VVYQVQFKYT DSKWFIADIM SIGVNCTQIT ATECDETAAS |
| | | 110 120 130 140 150 |
| | | PSAGFPMDFN VTLRLRAELG ALHSAWVTMP WFQHYRNVTV GPPENIEVTP |
| | | 160 170 180 190 200 |
| | | GEGSLIIRFS SPFDIADTST AFFCYYVHYW EKGGIQQVKG PFRSNSISLD |
| | | 210 220 230 240 250 |
| | | NLKPSRVYCL QVQAQLLNNK SNIFRVGHLS NISCYETMAD ASTELQQVIT |
| | | 260 270 280 290 300 |
| | | ISVGTFSLLS WLAGACFFLV LKYRGLIKYW FHTPPSIPLQ IEEYLKDPTQ |
| | | 310 320 330 |
| | | PILEALDKDS SPKDDVWDSV SIISFPEKEQ EDVLQTL |
| 90 | ACP51 | QVQLQESGGGLVQAGGSLRLSCAASGRIFSIDIMSWYRQAPGKQRELVARITRG |
| | Mouse | GTISYDDSVKGRFTISRDNAKNTVYLQMNSLKPEDTGVYYCNALYGTDYWGKG |
| | IFG | TQVTVSSggggsggggsggggsEVQLVESGGGLVQPGNSLRLSCAASGFTFSKFGMSW |
| | fusion | VRQAPGKGLEWVSSISGSGRDTLYAESVKGRFTISRDNAKTTLYLQMNSLRPED |
| | protein | TAVYYCTIGGSLSVSSQGTLVTVSSSGGPGPAGMKGLPGShgtviesleslnnyfnssgidve |
| | | ekslfldiwrnwqkdgdmkilqsqiisfylrlfevlkdnqaisnnisvieshlittffsnskakkdafmsiakfevnnpqvqr |
| | | qafnelirvvhqllpesslrkrkrsrcSGGPGPAGMKGLPGSEVQLVESGGGLVQPGNSLRLSC |
| | | AASGFTFSKFGMSWVRQAPGKGLEWVSSISGSGRDTLYAESVKGRFTISRDNAK |
| | | TTLYLQMNSLRPEDTAVYYCTIGGSLSVSSQGTLVTVSSHHHHHH |
| 91 | ACP52 | EVQLVESGGGLVQPGNSLRLSCAASGFTFSKFGMSWVRQAPGKGLEWVSSISGS |
| | Mouse | GRDTLYAESVKGRFTISRDNAKTTLYLQMNSLRPEDTAVYYCTIGGSLSVSSQGT |
| | IFG | LVTVSSSGGPGPAGMKGLPGShgtviesleslnnyfnssgidveekslfldiwrnwqkdgdmkilqsqiisf |
| | fusion | ylrlfevlkdnqaisnnisvieshlittffsnskakkdafmsiakfevnnpqvqrqafnelirvvhqllpesslrkrkrsrcSG |
| | protein | GPGPAGMKGLPGSEVQLVESGGGLVQPGNSLRLSCAASGFTFSKFGMSWVRQA |
| | | PGKGLEWVSSISGSGRDTLYAESVKGRFTISRDNAKTTLYLQMNSLRPEDTAVY |
| | | YCTIGGSLSVSSQGTLVTVSSSGGPGPAGMKGLPGSEVQLVESGGGLVQPGNSL |
| | | RLSCAASGFTFSKFGMSWVRQAPGKGLEWVSSISGSGRDTLYAESVKGRFTISR |
| | | DNAKTTLYLQMNSLRPEDTAVYYCTIGGSLSVSSQGTLVTVSSggggsggggsggggs |
| | | QVQLQESGGGLVQAGGSLRLSCAASGRIFSIDIMSWYRQAPGKQRELVARITRG |
| | | GTISYDDSVKGRFTISRDNAKNTVYLQMNSLKPEDTGVYYCNALYGTDYWGKG |
| | | TQVTVSSHHHHHH |
| 92 | ACP53 | eahkseiahryndlgeqhfkglvliafsqylqkcsydehaklvqevtdfaktcvadesaancdkslhtlfgdklcaipnlren |
| | Mouse | ygeladcctkqepemecflqhkddnpslppferpeaeamctsfkenpttfmghylhevarrhpyfyapellyyaeqynei |
| | IFG | ltqccaeadkescltpkldgvkekalvssvrqrmkcssmqkfgerafkawavarlsqtfpnadfaeitklatdltkvnkecc |
| | fusion | hgdllecaddraelakymcenqatissklqtccdkpllkkahclsevehdtmpadlpaiaadfvedqevcknyaeakdvfl |
| | protein | gtflyeysrrhpdysyslllrlakkyeatlekccaeanppacygtvlaefqplveepknlvktncdlyeklgeygfqnailvry |
| | | tqkapqvstptiveaarnlgrvgtkcctlpedqrlpcvedylsailnrvcllhektpvsehvtkccsgslverrpcfsaltvdety |
| | | vpkefkaetftfhsdictlpekekqikkqtalaelvkhkpkataeqlktvmddfaqfldtcckaadkdtcfstegpnlvtrckd |
| | | alaSGGPGPAGMKGLPGShgtviesleslnnyfnssgidveekslfldiwrnwqkdgdmkilqsqiisfylrlfev |
| | | lkdnqaisnnisvieshlittffsnskakkdafmsiakfevnnpqvqrqafnelirvvhqllpesslrkrkrsrcSGGPGPA |
| | | GMKGLPGSeahkseiahryndlgeqhfkglvliafsqylqkcsydehaklvqevtdfaktcvadesaancdkslhtlf |
| | | gdklcaipnlrenygeladcctkqepernecflqhkddnpslppferpeaeamctsfkenpttfmghylhevarrhpyfya |
| | | pellyyaeqyneiltqccaeadkescltpkldgvkekalvssvrqrmkcssmqkfgerafkawavarlsqtfpnadfaeitk |
| | | latdltkvnkecchgdllecaddraelakymcenqatissklqtccdkpllkkahclsevehdtmpadlpaiaadfvedqev |
| | | cknyaeakdvflgtflyeysrrhpdysyslllrlakkyeatlekccaeanppacygtvlaefqplveepknlvktncdlyekl |
| | | geygfqnailvrytqkapqvstptlveaarnlgrvgtkcctlpedqrlpcvedylsailnrycllhektpvsehvtkccsgslve |
| | | rrpcfsaltvdetyvpkefkaetftfhsdictlpekekqikkqtalaelvkhkpkataeqlktvmddfaqfldtcckaadkdtc |
| | | fstegpnlvtrckdalaHHHHHH |
| 93 | ACP54 | eahkseiahryndlgeqhfkglvliafsqylqkcsydehaklvqevtdfaktcvadesaancdkslhtlfgdklcaipnlren |
| | Mouse | ygeladcctkqepemecflqhkddnpslppferpeaeamctsfkenpttfmghylhevarrhpyfyapellyyaeqynei |
| | IFG | ltqccaeadkescltpkldgvkekalvssvrqrmkcssmqkfgerafkawavarlsqtfpnadfaeitklatdltkvnkecc |
| | fusion | hgdllecaddraelakymcenqatissklqtccdkpllkkahclsevehdtmpadlpaiaadfvedqevcknyaeakdvfl |
| | protein | gtflyeysrrhpdysvslllrlakkyeatlekccaeanppacygtvlaefqplveepknlvktncdlyeklgeygfqnailvry |
| | | tqkapqvstptlveaarnlgrvgtkcctlpedqrlpcvedylsailnrvcllhektpvsehvtkccsgslverrpcfsaltvdety |
| | | vpkefkaetftfhsdictlpekekqikkqtalaelvkhkpkataeqlktvmddfaqfldtcckaadkdtcfstegpnlvtrckd |
| | | alaSGGPGPAGMKGLPGShgtviesleslnnyfnssgidveekslfldiwrnwqkdgdmkilqsqiisfylrlfev |
| | | lkdnqaisnnisvieshlittffsnskakkdafmsiakfevnnpqvqrqafnelirvvhqllpesslrkrkrsrcggggsgggg |
| | | sggggshgtviesleslnnyfnssgidveekslfldiwrnwqkdgdmkilqsqiisfylrlfevlkdnqaisnnisvieshlitt |
| | | ffsnskakkdafmsiakfevnnpqvqrqafnelirvvhqllpesslrkrkrsrcSGGPGPAGMKGLPGSeahkse |
| | | iahryndlgeqhfkglvliafsqylqkcsydehaklvqevtdfaktcvadesaancdkslhtlfgdklcaipnlrenygelad |
| | | cctkqepernecflqhkddnpslppferpeaeamctsfkenpttfmghylhevarrhpyfyapellyyaeqyneiltqccae |
| | | adkescltpkldgvkekalvssvrqrmkcssmqkfgerafkawavarlsqtfpnadfaeitklatdltkvnkecchgdllec |
| | | addraelakymcenqatissklqtccdkpllkkahclsevehdtmpadlpaiaadfvedqevcknyaeakdvflgtflyey |
| | | srrhpdysyslllrlakkyeatlekccaeanppacygtvlaefqplveepknlvktncdlyeklgeygfqnailvrytqkapq |
| | | vstptlveaarnlgrvgtkcctlpedqrlpcvedylsailnrycllhektpvsehvtkccsgslverrpcfsaltvdetyvpkefk |
| | | aetftfhsdictlpekekqikkqtalaelvkhkpkataeqlktvmddfaqfldtcckaadkdtcfstegpnlvtrckdalaHH |
| | | HHHH |
| 94 | ACP50 | mdmrvpaqllgllllwlrgarcQVQLQESGGGLVQAGGSLRLSCAASGRIFSIDIMSWYRQA |
| | Mouse | PGKQRELVARITRGGTISYDDSVKGRFTISRDNAKNTVYLQMNSLKPEDTGVYY |
| | IFG | CNALYGTDYWGKGTQVTVSSggggsggggsggggsEVQLVESGGGLVQPGNSLRLSC |
| | fusion | AASGFTFSKFGMSWVRQAPGKGLEWVSSISGSGRDTLYAESVKGRFTISRDNAK |
| | protein | TTLYLQMNSLRPEDTAVYYCTIGGSLSVSSQGTLVTVSSSGGPGPAGMKGLPGSh |
| | | gtviesleslnnyfnssgidveekslfldiwrnwqkdgdmkilqsqiisfylrlfevlkdnqaisnnisvieshlittffsnskak |
| | | kdafmsiakfevnnpqvqrqafnelirvvhqllpesslrkrkrsrcggggsggggsggggshgtviesleslnnyfnssgid |
| | | veekslfldiwrnwqkdgdmkilqsqiisfylrlfevlkdnqaisnnisvieshlittffsnskakkdafmsiakfevnnpqv |
| | | qrqafnelirvvhqllpesslrkrkrsrcSGGPGPAGMKGLPGSEVQLVESGGGLVQPGNSLRLS |
| | | CAASGFTFSKFGMSWVRQAPGKGLEWVSSISGSGRDTLYAESVKGRFTISRDNA |
| | | KTTLYLQMNSLRPEDTAVYYCTIGGSLSVSSQGTLVTVSSHHHHHH |
| 95 | ACP55 | mdmrvpaqllgllllwlrgarcEVQLVESGGGLVQPGNSLRLSCAASGFTFSKFGMSWVRQ |
| | Mouse | APGKGLEWVSSISGSGRDTLYAESVKGRFTISRDNAKTTLYLQMNSLRPEDTAV |
| | IFG | YYCTIGGSLSVSSQGTLVTVSSSGGPGPAGMKGLPGShgtviesleslnnyfnssgidveekslfl |
| | fusion | diwrnwqkdgdmkilqsqiisfylrlfevlkdnqaisnnisvieshlittffsnskakkdafmsiakfevnnpqvqrqafnel |
| | protein | irvvhqllpesslrkrkrsrcSGGPGPAGMKGLPGSEVQLVESGGGLVQPGNSLRLSCAASG |
| | | FTFSKFGMSWVRQAPGKGLEWVSSISGSGRDTLYAESVKGRFTISRDNAKTTLY |
| | | LQMNSLRPEDTAVYYCTIGGSLSVSSQGTLVTVSSSGGPGPAGMKGLPGShgtvies |
| | | leslnnyfnssgidveekslfldiwrnwqkdgdmkilqsqiisfylrlfevlkdnqaisnnisvieshlittffsnskakkdaf |
| | | msiakfevnnpqvqrqafnelirvvhqllpesslrkrkrsrcSGGPGPAGMKGLPGSEVQLVESGGGL |
| | | VQPGNSLRLSCAASGFTFSKFGMSWVRQAPGKGLEWVSSISGSGRDTLYAESVK |
| | | GRFTISRDNAKTTLYLQMNSLRPEDTAVYYCTIGGSLSVSSQGTLVTVSSHHHHH |
| | | H |
| 96 | ACP56 | mdmrvpaqllgllllwlrgarcQVQLQESGGGLAQAGGSLSLSCAASGFTVSNSVMAWYR |
| | Mouse | QTPGKQREFVAIINSVGSTNYADSVKGRFTISRDNAKNTVYLQMNNLKPEDTAV |
| | IFG | YVCNRNFDRIYWGQGTQVTVSSggggsggggsggggsEVQLVESGGGLVQPGNSLRLS |
| | fusion | CAASGFTFSKFGMSWVRQAPGKGLEWVSSISGSGRDTLYAESVKGRFTISRDNA |
| | protein | KTTLYLQMNSLRPEDTAVYYCTIGGSLSVSSQGTLVTVSSSGGPGPAGMKGLPG |
| | | Shgtviesleslnnyfnssgidveekslfldiwrnwqkdgdmkilqsqiisfylrlfevlkdnqaisnnisvieshlittffsnsk |
| | | akkdafmsiakfevnnpqvqrqafnelirvvhqllpesslrkrkrsrcSGGPGPAGMKGLPGSEVQLVES |
| | | GGGLVQPGNSLRLSCAASGFTFSKFGMSWVRQAPGKGLEWVSSISGSGRDTLYA |
| | | ESVKGRFTISRDNAKTTLYLQMNSLRPEDTAVYYCTIGGSLSVSSQGTLVTVSSH |
| | | HHHHHEPEA |
| 97 | ACP57 | mdmrvpaqllgllllwlrgarcEVQLVESGGGLVQPGNSLRLSCAASGFTFSKFGMSWVRQ |
| | Mouse | APGKGLEWVSSISGSGRDTLYAESVKGRFTISRDNAKTTLYLQMNSLRPEDTAV |
| | IFG | YYCTIGGSLSVSSQGTLVTVSSSGGPGPAGMKGLPGShgtviesleslnnyfnssgidveekslfl |
| | fusion | diwrnwqkdgdmkilqsqiisfylrlfevlkdnqaisnnisvieshlittffsnskakkdafmsiakfevnnpqvqrqafnel |
| | protein | irvvhqllpesslrkrkrsrcSGGPGPAGMKGLPGSEVQLVESGGGLVQPGNSLRLSCAASG |
| | | FTFSKFGMSWVRQAPGKGLEWVSSISGSGRDTLYAESVKGRFTISRDNAKTTLY |
| | | LQMNSLRPEDTAVYYCTIGGSLSVSSQGTLVTVSSggggsggggsggggsQVQLQESG |
| | | GGLAQAGGSLSLSCAASGFTVSNSVMAWYRQTPGKQREFVAIINSVGSTNYADS |
| | | VKGRFTISRDNAKNTVYLQMNNLKPEDTAVYVCNRNFDRIYWGQGTQVTVSSH |
| | | HHHHHEPEA |
| 98 | ACP58 | mdmrvpaqllgllllwlrgarcEVQLVESGGGLVQPGNSLRLSCAASGFTFSKFGMSWVRQ |
| | Mouse | APGKGLEWVSSISGSGRDTLYAESVKGRFTISRDNAKTTLYLQMNSLRPEDTAV |
| | IFG | YYCTIGGSLSVSSQGTLVTVSSSGGPGPAGMKGLPGShgtviesleslnnyfnssgidveekslfl |
| | fusion | diwrnwqkdgdmkilqsqiisfylrlfevlkdnqaisnnisvieshlittffsnskakkdafmsiakfevnnpqvqrqafnel |
| | protein | irvvhqllpesslrkrkrsrcSGGPGPAGMKGLPGShgtviesleslnnyfnssgidveekslfldiwrnwqkdgd |
| | | mkilqsqiisfylrlfevlkdnqaisnnisvieshlittffsnskakkdafmsiakfevnnpqvqrqafnelirvvhqllpesslr |
| | | krkrsrcSGGPGPAGMKGLPGSEVQLVESGGGLVQPGNSLRLSCAASGFTFSKFGMS |
| | | WVRQAPGKGLEWVSSISGSGRDTLYAESVKGRFTISRDNAKTTLYLQMNSLRPE |
| | | DTAVYYCTIGGSLSVSSQGTLVTVSSggggsggggsggggsQVQLQESGGGLVQAGGS |
| | | LRLSCAASGRIFSIDIMSWYRQAPGKQRELVARITRGGTISYDDSVKGRFTISRDN |
| | | AKNTVYLQMNSLKPEDTGVYYCNALYGTDYWGKGTQVTVSSHHHHHHEPEA |
| 99 | ACP59 | mdmrvpaqllgllllwlrgarcQVQLQESGGGLAQAGGSLSLSCAASGFTVSNSVMAWYR |
| | Mouse | QTPGKQREFVAIINSVGSTNYADSVKGRFTISRDNAKNTVYLQMNNLKPEDTAV |
| | IFG | YVCNRNFDRIYWGQGTQVTVSSggggsggggsggggsEVQLVESGGGLVQPGNSLRLS |
| | fusion | CAASGFTFSKFGMSWVRQAPGKGLEWVSSISGSGRDTLYAESVKGRFTISRDNA |
| | protein | KTTLYLQMNSLRPEDTAVYYCTIGGSLSVSSQGTLVTVSSSGGPGPAGMKGLPG |
| | | Shgtviesleslnnyfnssgidveekslfldiwrnwqkdgdmkilqsqiisfylrlfevlkdnqaisnnisvieshlittffsnsk |
| | | akkdafmsiakfevnnpqvqrqafnelirvvhqllpesslrkrkrsrcSGGPGPAGMKGLPGShgtvieslesln |
| | | nyfnssgidveekslfldiwrnwqkdgdmkilqsqiisfylrlfevlkdnqaisnnisvieshlittffsnskakkdafmsiak |
| | | fevnnpqvqrqafnelirvvhqllpesslrkrkrsrcSGGPGPAGMKGLPGSEVQLVESGGGLVQPG |
| | | NSLRLSCAASGFTFSKFGMSWVRQAPGKGLEWVSSISGSGRDTLYAESVKGRFTI |
| | | SRDNAKTTLYLQMNSLRPEDTAVYYCTIGGSLSVSSQGTLVTVSSHHHHHHEPE |
| | | A |
| 100 | ACP60 | mdmrvpaqllgllllwlrgarcEVQLVESGGGLVQPGNSLRLSCAASGFTFSKFGMSWVRQ |
| | Mouse | APGKGLEWVSSISGSGRDTLYAESVKGRFTISRDNAKTTLYLQMNSLRPEDTAV |
| | IFG | YYCTIGGSLSVSSQGTLVTVSSSGGPGPAGMKGLPGShgtviesleslnnyfnssgidveekslfl |
| | fusion | diwrnwqkdgdmkilqsqiisfylrlfevlkdnqaisnnisvieshlittffsnskakkdafmsiakfevnnpqvqrqafnel |
| | protein | irvvhqllpesslrkrkrsrcSGGPGPAGMKGLPGShgtviesleslnnyfnssgidveekslfldiwrnwqkdgd |
| | | mkilqsqiisfylrlfevlkdnqaisnnisvieshlittffsnskakkdafmsiakfevnnpqvqrqafnelirvvhqllpesslr |
| | | krkrsrcSGGPGPAGMKGLPGSEVQLVESGGGLVQPGNSLRLSCAASGFTFSKFGMS |
| | | WVRQAPGKGLEWVSSISGSGRDTLYAESVKGRFTISRDNAKTTLYLQMNSLRPE |
| | | DTAVYYCTIGGSLSVSSQGTLVTVSSggggsggggsggggsQVQLQESGGGLAQAGGS |
| | | LSLSCAASGFTVSNSVMAWYRQTPGKQREFVAIINSVGSTNYADSVKGRFTISRD |
| | | NAKNTVYLQMNNLKPEDTAVYVCNRNFDRIYWGQGTQVTVSSHHHHHHEPEA |
| 101 | ACP61 | mdmrvpaqllgllllwlrgarcEVQLVESGGGLVQPGNSLRLSCAASGFTFSKFGMSWVRQ |
| | Mouse | APGKGLEWVSSISGSGRDTLYAESVKGRFTISRDNAKTTLYLQMNSLRPEDTAV |
| | IFG | YYCTIGGSLSVSSQGTLVTVSSSGGPGPAGMKGLPGShgtviesleslnnyfnssgidveekslfl |
| | fusion | diwrnwqkdgdmkilqsqiisfylrlfevlkdnqaisnnisvieshlittffsnskakkdafmsiakfevnnpqvqrqafnel |
| | protein | irvvhqllpesslrkrkrsrcSGGPGPAGMKGLPGShgtviesleslnnyfnssgidveekslfldiwrnwqkdgd |
| | | mkilqsqiisfylrlfevlkdnqaisnnisvieshlittffsnskakkdafmsiakfevnnpqvqrqafnelirvvhqllpesslr |
| | | krkrsrcSGGPGPAGMKGLPGSEVQLVESGGGLVQPGNSLRLSCAASGFTFSKFGMS |
| | | WVRQAPGKGLEWVSSISGSGRDTLYAESVKGRFTISRDNAKTTLYLQMNSLRPE |
| | | DTAVYYCTIGGSLSVSSQGTLVTVSSggggsggggsggggsEVQLVESGGGLVQPGGSL |
| | | RLSCAASGFTFSSYAMSWVRQAPGKGLEWVSAISGSGGSTYYADSVKGRFTISR |
| | | DNSKNTLYLQMNSLRAEDTAVYYCARGVGAFRPYRKHEWGQGTLVTVSRgggg |
| | | sggggsggggsSSELTQDPAVSVALGQTVRITCQGDSLRSYYASWYQQKPGQAPVLV |
| | | IYGKNNRPSGIPDRFSGSSSGNTASLTTTGAQAEDEADYYCNSSPFEHNLVVFGG |
| | | GTKLTVLHHHHHHEPEA |
| 102 | ACP63 | mdmrvpaqllgllllwlrgarcEVQLVESGGGLVQPGGSLRLSCAASGFTFSSYAMSWVRQ |
| | Anti-FN | APGKGLEWVSAISGSGGSTYYADSVKGRFTISRDNSKNTLYLQMNSLRAEDTAV |
| | CGS-2 | YYCARGVGAFRPYRKHEWGQGTLVTVSRggggsggggsggggsSSELTQDPAVSVAL |
| | scFv | GQTVRITCQGDSLRSYYASWYQQKPGQAPVLVIYGKNNRPSGIPDRFSGSSSGNT |
| | | ASLTTTGAQAEDEADYYCNSSPFEHNLVVFGGGTKLTVLHHHHHHEPEA |
| 103 | ACP69 | mdmrvpaqllgllllwlrgarcEVQLVESGGGLVQPGNSLRLSCAASGFTFSKFGMSWVRQ |
| | Mouse | APGKGLEWVSSISGSGRDTLYAESVKGRFTISRDNAKTTLYLQMNSLRPEDTAV |
| | IFG | YYCTIGGSLSVSSQGTLVTVSSSGGPGPAGMKGLPGShgtviesleslnnyfnssgidveekslfl |
| | fusion | diwrnwqkdgdmkilqsqiisfylrlfevlkdnqaisnnisvieshlittffsnskakkdafmsiakfevnnpqvqrqafnel |
| | protein | irvvhqllpesslrkrkrsrcSGGPGPAGMKGLPGSEVQLVESGGGLVQPGNSLRLSCAASG |
| | | FTFSKFGMSWVRQAPGKGLEWVSSISGSGRDTLYAESVKGRFTISRDNAKTTLY |
| | | LQMNSLRPEDTAVYYCTIGGSLSVSSQGTLVTVSSSGGPGPAGMKGLPGShgtvies |
| | | leslnnyfnssgidveekslfldiwrnwqkdgdmkilqsqiisfylrlfevlkdnqaisnnisvieshlittffsnskakkdaf |
| | | msiakfevnnpqvqrqafnelirvvhqllpesslrkrkrsrcHHHHHHEPEA |
| 104 | ACP70 | mdmrvpaqllgllllwlrgarchgtviesleslnnyfnssgidveekslfldiwrnwqkdgdmkilqsqiisfylrlfevlkd |
| | Mouse | nqaisnnisvieshlittffsnskakkdafmsiakfevnnpqvqrqafnelirvvhqllpesslrkrkrsrcSGGPGPAG |
| | IFG | MKGLPGSEVQLVESGGGLVQPGNSLRLSCAASGFTFSKFGMSWVRQAPGKGLE |
| | fusion | WVSSISGSGRDTLYAESVKGRFTISRDNAKTTLYLQMNSLRPEDTAVYYCTIGGS |
| | protein | LSVSSQGTLVTVSSSGGPGPAGMKGLPGShgtviesleslnnyfnssgidveekslfldiwrnwqkdg |
| | | dmkilqsqiisfylrlfevlkdnqaisnnisvieshlittffsnskakkdafmsiakfevnnpqvqrqafnelirvvhqllpessl |
| | | rkrkrsrcSGGPGPAGMKGLPGSEVQLVESGGGLVQPGNSLRLSCAASGFTFSKFGM |
| | | SWVRQAPGKGLEWVSSISGSGRDTLYAESVKGRFTISRDNAKTTLYLQMNSLRP |
| | | EDTAVYYCTIGGSLSVSSQGTLVTVSSHHHHHHEPEA |
| 105 | ACP71 | mdmrvpaqllgllllwlrgarchgtviesleslnnyfnssgidveekslfldiwrnwqkdgdmkilqsqiisfylrlfevlkd |
| | Mouse | nqaisnnisvieshlittffsnskakkdafmsiakfevnnpqvqrqafnelirvvhqllpesslrkrkrsrcSGGPGPAG |
| | IFG | MKGLPGSEAHKSEIAHRYNDLGEQHFKGLVLIAFSQYLQKCSYDEHAKLVQEVT |
| | fusion | DFAKTCVADESAANCDKSLHTLFGDKLCAIPNLRENYGELADCCTKQEPERNEC |
| | protein | FLQHKDDNPSLPPFERPEAEAMCTSFKENPTTFMGHYLHEVARRHPYFYAPELL |
| | | YYAEQYNEILTQCCAEADKESCLTPKLDGVKEKALVSSVRQRMKCSSMQKFGE |
| | | RAFKAWAVARLSQTFPNADFAEITKLATDLTKVNKECCHGDLLECADDRAELA |
| | | KYMCENQATISSKLQTCCDKPLLKKAHCLSEVEHDTMPADLPAIAADFVEDQEV |
| | | CKNYAEAKDVFLGTFLYEYSRRHPDYSVSLLLRLAKKYEATLEKCCAEANPPAC |
| | | YGTVLAEFQPLVEEPKNLVKTNCDLYEKLGEYGFQNAILVRYTQKAPQVSTPTL |
| | | VEAARNLGRVGTKCCTLPEDQRLPCVEDYLSAILNRVCLLHEKTPVSEHVTKCC |
| | | SGSLVERRPCFSALTVDETYVPKEFKAETFTFHSDICTLPEKEKQIKKQTALAELV |
| | | KHKPKATAEQLKTVMDDFAQFLDTCCKAADKDTCFSTEGPNLVTRCKDALASG |
| | | GPGPAGMKGLPGShgtviesleslnnyfnssgidveekslfldiwrnwqkdgdmkilqsqiisfylrlfevlkdnq |
| | | aisnnisvieshlittffsnskakkdafmsiakfevnnpqvqrqafnelirvvhqllpesslrkrkrsrcSGGPGPAGM |
| | | KGLPGSEAHKSEIAHRYNDLGEQHFKGLVLIAFSQYLQKCSYDEHAKLVQEVTD |
| | | FAKTCVADESAANCDKSLHTLFGDKLCAIPNLRENYGELADCCTKQEPERNECF |
| | | LQHKDDNPSLPPFERPEAEAMCTSFKENPTTFMGHYLHEVARRHPYFYAPELLY |
| | | YAEQYNEILTQCCAEADKESCLTPKLDGVKEKALVSSVRQRMKCSSMQKFGER |
| | | AFKAWAVARLSQTFPNADFAEITKLATDLTKVNKECCHGDLLECADDRAELAK |
| | | YMCENQATISSKLQTCCDKPLLKKAHCLSEVEHDTMPADLPAIAADFVEDQEVC |
| | | KNYAEAKDVFLGTFLYEYSRRHPDYSVSLLLRLAKKYEATLEKCCAEANPPACY |
| | | GTVLAEFQPLVEEPKNLVKTNCDLYEKLGEYGFQNAILVRYTQKAPQVSTPTLV |
| | | EAARNLGRVGTKCCTLPEDQRLPCVEDYLSAILNRVCLLHEKTPVSEHVTKCCS |
| | | GSLVERRPCFSALTVDETYVPKEFKAETFTFHSDICTLPEKEKQIKKQTALAELVK |
| | | HKPKATAEQLKTVMDDFAQFLDTCCKAADKDTCFSTEGPNLVTRCKDALAHHH |
| | | HHHEPEA |
| 106 | ACP72 | mdmrvpaqllgllllwlrgarcEAHKSEIAHRYNDLGEQHFKGLVLIAFSQYLQKCSYDEHA |
| | Mouse | KLVQEVTDFAKTCVADESAANCDKSLHTLFGDKLCAIPNLRENYGELADCCTK |
| | IFG | QEPERNECFLQHKDDNPSLPPFERPEAEAMCTSFKENPTTFMGHYLHEVARRHP |
| | fusion | YFYAPELLYYAEQYNEILTQCCAEADKESCLTPKLDGVKEKALVSSVRQRMKCS |
| | protein | SMQKFGERAFKAWAVARLSQTFPNADFAEITKLATDLTKVNKECCHGDLLECA |
| | | DDRAELAKYMCENQATISSKLQTCCDKPLLKKAHCLSEVEHDTMPADLPAIAAD |
| | | FVEDQEVCKNYAEAKDVFLGTFLYEYSRRHPDYSVSLLLRLAKKYEATLEKCCA |
| | | EANPPACYGTVLAEFQPLVEEPKNLVKTNCDLYEKLGEYGFQNAILVRYTQKAP |
| | | QVSTPTLVEAARNLGRVGTKCCTLPEDQRLPCVEDYLSAILNRVCLLHEKTPVSE |
| | | HVTKCCSGSLVERRPCFSALTVDETYVPKEFKAETFTFHSDICTLPEKEKQIKKQT |
| | | ALAELVKHKPKATAEQLKTVMDDFAQFLDTCCKAADKDTCFSTEGPNLVTRCK |
| | | DALASGGPGPAGMKGLPGShgtviesleslnnyfnssgidveekslfldiwrnwqkdgdmkilqsqiisfylr |
| | | lfevlkdnqaisnnisvieshlittffsnskakkdafmsiakfevnnpqvqrqafnelirvvhqllpesslrkrkrsrcSGGP |
| | | GPAGMKGLPGSEAHKSEIAHRYNDLGEQHFKGLVLIAFSQYLQKCSYDEHAKLV |
| | | QEVTDFAKTCVADESAANCDKSLHTLFGDKLCAIPNLRENYGELADCCTKQEPE |
| | | RNECFLQHKDDNPSLPPFERPEAEAMCTSFKENPTTFMGHYLHEVARRHPYFYA |
| | | PELLYYAEQYNEILTQCCAEADKESCLTPKLDGVKEKALVSSVRQRMKCSSMQ |
| | | KFGERAFKAWAVARLSQTFPNADFAEITKLATDLTKVNKECCHGDLLECADDR |
| | | AELAKYMCENQATISSKLQTCCDKPLLKKAHCLSEVEHDTMPADLPAIAADFVE |
| | | DQEVCKNYAEAKDVFLGTFLYEYSRRHPDYSVSLLLRLAKKYEATLEKCCAEA |
| | | NPPACYGTVLAEFQPLVEEPKNLVKTNCDLYEKLGEYGFQNAILVRYTQKAPQV |
| | | STPTLVEAARNLGRVGTKCCTLPEDQRLPCVEDYLSAILNRVCLLHEKTPVSEHV |
| | | TKCCSGSLVERRPCFSALTVDETYVPKEFKAETFTFHSDICTLPEKEKQIKKQTAL |
| | | AELVKHKPKATAEQLKTVMDDFAQFLDTCCKAADKDTCFSTEGPNLVTRCKDA |
| | | LASGGPGPAGMKGLPGShgtviesleslnnyfnssgidveekslfldiwrnwqkdgdmkilqsqiisfylrlfe |
| | | vlkdnqaisnnisvieshlittffsnskakkdafmsiakfevnnpqvqrqafnelirvvhqllpesslrkrkrsrcHHHHH |
| | | HEPEA |
| 107 | ACP73 | mdmrvpaqllgllllwlrgarcEAHKSEIAHRYNDLGEQHFKGLVLIAFSQYLQKCSYDEHA |
| | Mouse | KLVQEVTDFAKTCVADESAANCDKSLHTLFGDKLCAIPNLRENYGELADCCTK |
| | IFG | QEPERNECFLQHKDDNPSLPPFERPEAEAMCTSFKENPTTFMGHYLHEVARRHP |
| | fusion | YFYAPELLYYAEQYNEILTQCCAEADKESCLTPKLDGVKEKALVSSVRQRMKCS |
| | protein | SMQKFGERAFKAWAVARLSQTFPNADFAEITKLATDLTKVNKECCHGDLLECA |
| | | DDRAELAKYMCENQATISSKLQTCCDKPLLKKAHCLSEVEHDTMPADLPAIAAD |
| | | FVEDQEVCKNYAEAKDVFLGTFLYEYSRRHPDYSVSLLLRLAKKYEATLEKCCA |
| | | EANPPACYGTVLAEFQPLVEEPKNLVKTNCDLYEKLGEYGFQNAILVRYTQKAP |
| | | QVSTPTLVEAARNLGRVGTKCCTLPEDQRLPCVEDYLSAILNRVCLLHEKTPVSE |
| | | HVTKCCSGSLVERRPCFSALTVDETYVPKEFKAETFTFHSDICTLPEKEKQIKKQT |
| | | ALAELVKHKPKATAEQLKTVMDDFAQFLDTCCKAADKDTCFSTEGPNLVTRCK |
| | | DALASGGPGPAGMKGLPGShgtviesleslnnyfnssgidveekslfldiwrnwqkdgdmkilqsqiisfylr |
| | | lfevlkdnqaisnnisvieshlittffsnskakkdafmsiakfevnnpqvqrqafnelirvvhqllpesslrkrkrsrcSGGP |
| | | GPAGMKGLPGSEAHKSEIAHRYNDLGEQHFKGLVLIAFSQYLQKCSYDEHAKLV |
| | | QEVTDFAKTCVADESAANCDKSLHTLFGDKLCAIPNLRENYGELADCCTKQEPE |
| | | RNECFLQHKDDNPSLPPFERPEAEAMCTSFKENPTTFMGHYLHEVARRHPYFYA |
| | | PELLYYAEQYNEILTQCCAEADKESCLTPKLDGVKEKALVSSVRQRMKCSSMQ |
| | | KFGERAFKAWAVARLSQTFPNADFAEITKLATDLTKVNKECCHGDLLECADDR |
| | | AELAKYMCENQATISSKLQTCCDKPLLKKAHCLSEVEHDTMPADLPAIAADFVE |
| | | DQEVCKNYAEAKDVFLGTFLYEYSRRHPDYSVSLLLRLAKKYEATLEKCCAEA |
| | | NPPACYGTVLAEFQPLVEEPKNLVKTNCDLYEKLGEYGFQNAILVRYTQKAPQV |
| | | STPTLVEAARNLGRVGTKCCTLPEDQRLPCVEDYLSAILNRVCLLHEKTPVSEHV |
| | | TKCCSGSLVERRPCFSALTVDETYVPKEFKAETFTFHSDICTLPEKEKQIKKQTAL |
| | | AELVKHKPKATAEQLKTVMDDFAQFLDTCCKAADKDTCFSTEGPNLVTRCKDA |
| | | LASGGPGPAGMKGLPGShgtviesleslnnyfnssgidveekslfldiwrnwqkdgdmkilqsqiisfylrlfe |
| | | vlkdnqaisnnisvieshlittffsnskakkdafmsiakfevnnpqvqrqafnelirvvhqllpesslrkrkrsrcSGGPGP |
| | | AGMKGLPGSEAHKSEIAHRYNDLGEQHFKGLVLIAFSQYLQKCSYDEHAKLVQ |
| | | EVTDFAKTCVADESAANCDKSLHTLFGDKLCAIPNLRENYGELADCCTKQEPER |
| | | NECFLQHKDDNPSLPPFERPEAEAMCTSFKENPTTFMGHYLHEVARRHPYFYAP |
| | | ELLYYAEQYNEILTQCCAEADKESCLTPKLDGVKEKALVSSVRQRMKCSSMQK |
| | | FGERAFKAWAVARLSQTFPNADFAEITKLATDLTKVNKECCHGDLLECADDRA |
| | | ELAKYMCENQATISSKLQTCCDKPLLKKAHCLSEVEHDTMPADLPAIAADFVED |
| | | QEVCKNYAEAKDVFLGTFLYEYSRRHPDYSVSLLLRLAKKYEATLEKCCAEANP |
| | | PACYGTVLAEFQPLVEEPKNLVKTNCDLYEKLGEYGFQNAILVRYTQKAPQVST |
| | | PTLVEAARNLGRVGTKCCTLPEDQRLPCVEDYLSAILNRVCLLHEKTPVSEHVT |
| | | KCCSGSLVERRPCFSALTVDETYVPKEFKAETFTFHSDICTLPEKEKQIKKQTALA |
| | | ELVKHKPKATAEQLKTVMDDFAQFLDTCCKAADKDTCFSTEGPNLVTRCKDAL |
| | | AHHHHHHEPEA |
| 108 | ACP74 | mdmrvpaqllgllllwlrgarcEAHKSEIAHRYNDLGEQHFKGLVLIAFSQYLQKCSYDEHA |
| | Mouse | KLVQEVTDFAKTCVADESAANCDKSLHTLFGDKLCAIPNLRENYGELADCCTK |
| | IFG | QEPERNECFLQHKDDNPSLPPFERPEAEAMCTSFKENPTTFMGHYLHEVARRHP |
| | fusion | YFYAPELLYYAEQYNEILTQCCAEADKESCLTPKLDGVKEKALVSSVRQRMKCS |
| | protein | SMQKFGERAFKAWAVARLSQTFPNADFAEITKLATDLTKVNKECCHGDLLECA |
| | | DDRAELAKYMCENQATISSKLQTCCDKPLLKKAHCLSEVEHDTMPADLPAIAAD |
| | | FVEDQEVCKNYAEAKDVFLGTFLYEYSRRHPDYSVSLLLRLAKKYEATLEKCCA |
| | | EANPPACYGTVLAEFQPLVEEPKNLVKTNCDLYEKLGEYGFQNAILVRYTQKAP |
| | | QVSTPTLVEAARNLGRVGTKCCTLPEDQRLPCVEDYLSAILNRVCLLHEKTPVSE |
| | | HVTKCCSGSLVERRPCFSALTVDETYVPKEFKAETFTFHSDICTLPEKEKQIKKQT |
| | | ALAELVKHKPKATAEQLKTVMDDFAQFLDTCCKAADKDTCFSTEGPNLVTRCK |
| | | DALASGGPGPAGMKGLPGShgtviesleslnnyfnssgidveekslfldiwrnwqkdgdmkilqsqiisfylr |
| | | lfevlkdnqaisnnisvieshlittffsnskakkdafmsiakfevnnpqvqrqafnelirvvhqllpesslrkrkrsrcSGGP |
| | | GPAGMKGLPGSggggsEAHKSEIAHRYNDLGEQHFKGLVLIAFSQYLQKCSYDEH |
| | | AKLVQEVTDFAKTCVADESAANCDKSLHTLFGDKLCAIPNLRENYGELADCCT |
| | | KQEPERNECFLQHKDDNPSLPPFERPEAEAMCTSFKENPTTFMGHYLHEVARRH |
| | | PYFYAPELLYYAEQYNEILTQCCAEADKESCLTPKLDGVKEKALVSSVRQRMKC |
| | | SSMQKFGERAFKAWAVARLSQTFPNADFAEITKLATDLTKVNKECCHGDLLEC |
| | | ADDRAELAKYMCENQATISSKLQTCCDKPLLKKAHCLSEVEHDTMPADLPAIAA |
| | | DFVEDQEVCKNYAEAKDVFLGTFLYEYSRRHPDYSVSLLLRLAKKYEATLEKCC |
| | | AEANPPACYGTVLAEFQPLVEEPKNLVKTNCDLYEKLGEYGFQNAILVRYTQKA |
| | | PQVSTPTLVEAARNLGRVGTKCCTLPEDQRLPCVEDYLSAILNRVCLLHEKTPVS |
| | | EHVTKCCSGSLVERRPCFSALTVDETYVPKEFKAETFTFHSDICTLPEKEKQIKKQ |
| | | TALAELVKHKPKATAEQLKTVMDDFAQFLDTCCKAADKDTCFSTEGPNLVTRC |
| | | KDALAggggsSGGPGPAGMKGLPGShgtviesleslnnyfnssgidveekslfldiwrnwqkdgdmkilq |
| | | sqiisfylrlfevlkdnqaisnnisvieshlittffsnskakkdafmsiakfevnnpqvqrqafnelirvvhqllpesslrkrkrsr |
| | | cSGGPGPAGMKGLPGSEAHKSEIAHRYNDLGEQHFKGLVLIAFSQYLQKCSYDE |
| | | HAKLVQEVTDFAKTCVADESAANCDKSLHTLFGDKLCAIPNLRENYGELADCC |
| | | TKQEPERNECFLQHKDDNPSLPPFERPEAEAMCTSFKENPTTFMGHYLHEVARR |
| | | HPYFYAPELLYYAEQYNEILTQCCAEADKESCLTPKLDGVKEKALVSSVRQRMK |
| | | CSSMQKFGERAFKAWAVARLSQTFPNADFAEITKLATDLTKVNKECCHGDLLE |
| | | CADDRAELAKYMCENQATISSKLQTCCDKPLLKKAHCLSEVEHDTMPADLPAIA |
| | | ADFVEDQEVCKNYAEAKDVFLGTFLYEYSRRHPDYSVSLLLRLAKKYEATLEK |
| | | CCAEANPPACYGTVLAEFQPLVEEPKNLVKTNCDLYEKLGEYGFQNAILVRYTQ |
| | | KAPQVSTPTLVEAARNLGRVGTKCCTLPEDQRLPCVEDYLSAILNRVCLLHEKTP |
| | | VSEHVTKCCSGSLVERRPCFSALTVDETYVPKEFKAETFTFHSDICTLPEKEKQIK |
| | | KQTALAELVKHKPKATAEQLKTVMDDFAQFLDTCCKAADKDTCFSTEGPNLVT |
| | | RCKDALAHHHHHHEPEA |
| 109 | ACP75 | mdmrvpaqllgllllwlrgarcEAHKSEIAHRYNDLGEQHFKGLVLIAFSQYLQKCSYDEHA |
| | Mouse | KLVQEVTDFAKTCVADESAANCDKSLHTLFGDKLCAIPNLRENYGELADCCTK |
| | IFG | QEPERNECFLQHKDDNPSLPPFERPEAEAMCTSFKENPTTFMGHYLHEVARRHP |
| | fusion | YFYAPELLYYAEQYNEILTQCCAEADKESCLTPKLDGVKEKALVSSVRQRMKCS |
| | protein | SMQKFGERAFKAWAVARLSQTFPNADFAEITKLATDLTKVNKECCHGDLLECA |
| | | DDRAELAKYMCENQATISSKLQTCCDKPLLKKAHCLSEVEHDTMPADLPAIAAD |
| | | FVEDQEVCKNYAEAKDVFLGTFLYEYSRRHPDYSVSLLLRLAKKYEATLEKCCA |
| | | EANPPACYGTVLAEFQPLVEEPKNLVKTNCDLYEKLGEYGFQNAILVRYTQKAP |
| | | QVSTPTLVEAARNLGRVGTKCCTLPEDQRLPCVEDYLSAILNRVCLLHEKTPVSE |
| | | HVTKCCSGSLVERRPCFSALTVDETYVPKEFKAETFTFHSDICTLPEKEKQIKKQT |
| | | ALAELVKHKPKATAEQLKTVMDDFAQFLDTCCKAADKDTCFSTEGPNLVTRCK |
| | | DALASGGPGPAGMKGLPGShgtviesleslnnyfnssgidveekslfldiwrnwqkdgdmkilqsqiisfylr |
| | | lfevlkdnqaisnnisvieshlittffsnskakkdafmsiakfevnnpqvqrqafnelirvvhqllpesslrkrkrsrcSGGP |
| | | GPAGMKGLPGSggggsggggsEAHKSEIAHRYNDLGEQHFKGLVLIAFSQYLQKCSY |
| | | DEHAKLVQEVTDFAKTCVADESAANCDKSLHTLFGDKLCAIPNLRENYGELAD |
| | | CCTKQEPERNECFLQHKDDNPSLPPFERPEAEAMCTSFKENPTTFMGHYLHEVA |
| | | RRHPYFYAPELLYYAEQYNEILTQCCAEADKESCLTPKLDGVKEKALVSSVRQR |
| | | MKCSSMQKFGERAFKAWAVARLSQTFPNADFAEITKLATDLTKVNKECCHGDL |
| | | LECADDRAELAKYMCENQATISSKLQTCCDKPLLKKAHCLSEVEHDTMPADLP |
| | | AIAADFVEDQEVCKNYAEAKDVFLGTFLYEYSRRHPDYSVSLLLRLAKKYEATL |
| | | EKCCAEANPPACYGTVLAEFQPLVEEPKNLVKTNCDLYEKLGEYGFQNAILVRY |
| | | TQKAPQVSTPTLVEAARNLGRVGTKCCTLPEDQRLPCVEDYLSAILNRVCLLHE |
| | | KTPVSEHVTKCCSGSLVERRPCFSALTVDETYVPKEFKAETFTFHSDICTLPEKEK |
| | | QIKKQTALAELVKHKPKATAEQLKTVMDDFAQFLDTCCKAADKDTCFSTEGPN |
| | | LVTRCKDALAggggsggggsSGGPGPAGMKGLPGShgtviesleslnnyfnssgidveekslfldiwrn |
| | | wqkdgdmkilqsqiisfylrlfevlkdnqaisnnisvieshlittffsnskakkdafmsiakfevnnpqvqrqafnelirvvh |
| | | qllpesslrkrkrsrcSGGPGPAGMKGLPGSEAHKSEIAHRYNDLGEQHFKGLVLIAFSQY |
| | | LQKCSYDEHAKLVQEVTDFAKTCVADESAANCDKSLHTLFGDKLCAIPNLREN |
| | | YGELADCCTKQEPERNECFLQHKDDNPSLPPFERPEAEAMCTSFKENPTTFMGH |
| | | YLHEVARRHPYFYAPELLYYAEQYNEILTQCCAEADKESCLTPKLDGVKEKALV |
| | | SSVRQRMKCSSMQKFGERAFKAWAVARLSQTFPNADFAEITKLATDLTKVNKE |
| | | CCHGDLLECADDRAELAKYMCENQATISSKLQTCCDKPLLKKAHCLSEVEHDT |
| | | MPADLPAIAADFVEDQEVCKNYAEAKDVFLGTFLYEYSRRHPDYSVSLLLRLAK |
| | | KYEATLEKCCAEANPPACYGTVLAEFQPLVEEPKNLVKTNCDLYEKLGEYGFQ |
| | | NAILVRYTQKAPQVSTPTLVEAARNLGRVGTKCCTLPEDQRLPCVEDYLSAILNR |
| | | VCLLHEKTPVSEHVTKCCSGSLVERRPCFSALTVDETYVPKEFKAETFTFHSDICT |
| | | LPEKEKQIKKQTALAELVKHKPKATAEQLKTVMDDFAQFLDTCCKAADKDTCF |
| | | STEGPNLVTRCKDALAHHHHHHEPEA |
| 110 | ACP78 | mdmrvpaqllgllllwlrgarcEVQLVESGGGLVQPGNSLRLSCAASGFTFSKFGMSWVRQ |
| | Mouse | APGKGLEWVSSISGSGRDTLYAESVKGRFTISRDNAKTTLYLQMNSLRPEDTAV |
| | IFG | YYCTIGGSLSVSSQGTLVTVSSggggsggggsggggshgtviesleslnnyfnssgidveekslfldiwrn |
| | fusion | wqkdgdmkilqsqiisfylrlfevlkdnqaisnnisvieshlittffsnskakkdafmsiakfevnnpqvqrqafnelirvvh |
| | protein | qllpesslrkrkrsrcggggsggggsggggsEVQLVESGGGLVQPGNSLRLSCAASGFTFSKFGM |
| | | SWVRQAPGKGLEWVSSISGSGRDTLYAESVKGRFTISRDNAKTTLYLQMNSLRP |
| | | EDTAVYYCTIGGSLSVSSQGTLVTVSSggggsggggsggggshgtviesleslnnyfnssgidveeksl |
| | | fldiwrnwqkdgdmkilqsqiisfylrlfevlkdnqaisnnisvieshlittffsnskakkdafmsiakfevnnpqvqrqafn |
| | | elirvvhqllpesslrkrkrsrcggggsggggsggggsEVQLVESGGGLVQPGNSLRLSCAASGFTFS |
| | | KFGMSWVRQAPGKGLEWVSSISGSGRDTLYAESVKGRFTISRDNAKTTLYLQM |
| | | NSLRPEDTAVYYCTIGGSLSVSSQGTLVTVSSHHEIHRHEPEA |
| 111 | ACP134 | mdmrvpaqllgllllwlrgarcEVQLVESGGGLVQPGNSLRLSCAASGFTFSKFGMSWVRQ |
| | Mouse | APGKGLEWVSSISGSGRDTLYAESVKGRFTISRDNAKTTLYLQMNSLRPEDTAV |
| | IFG | YYCTIGGSLSVSSQGTLVTVSSSGGPGPAGMKGLPGShgtviesleslnnyfnssgidveekslfl |
| | fuision | diwrnwqkdgdmkilqsqiisfylrlfevlkdnqaisnnisvieshlittffsnskakkdafmsiakfevnnpqvqrqafnel |
| | protein | irvvhqllpesslrkrkrsrcSGGPGPAGMKGLPGSEVQLVESGGGLVQPGNSLRLSCAASG |
| | | FTFSKFGMSWVRQAPGKGLEWVSSISGSGRDTLYAESVKGRFTISRDNAKTTLY |
| | | LQMNSLRPEDTAVYYCTIGGSLSVSSQGTLVTVSSSGGPGPAGMKGLPGShgtvies |
| | | leslnnyfnssgidveekslfldiwrnwqkdgdmkilqsqiisfylrlfevlkdnqaisnnisvieshlittffsnskakkdaf |
| | | msiakfevnnpqvqrqafnelirvvhqllpesslrkrkrsrcSGGPGPAGMKGLPGSEVQLVESGGGL |
| | | VQPGNSLRLSCAASGFTFSKFGMSWVRQAPGKGLEWVSSISGSGRDTLYAESVK |
| | | GRFTISRDNAKTTLYLQMNSLRPEDTAVYYCTIGGSLSVSSQGTLVTVSSggggsgg |
| | | ggsggggsQVQLQESGGGLAQAGGSLSLSCAASGFTVSNSVMAWYRQTPGKQREF |
| | | VAIINSVGSTNYADSVKGRFTISRDNAKNTVYLQMNNLKPEDTAVYVCNRNFDR |
| | | IYWGQGTQVTVSSHHHHHHEPEA |
| 112 | ACP135 | mdmrvpaqllgllllwlrgarcQVQLQESGGGLAQAGGSLSLSCAASGFTVSNSVMAWYR |
| | Mouse | QTPGKQREFVAIINSVGSTNYADSVKGRFTISRDNAKNTVYLQMNNLKPEDTAV |
| | IFG | YVCNRNFDRIYWGQGTQVTVSSggggsggggsggggsEVQLVESGGGLVQPGNSLRLS |
| | fusion | CAASGFTFSKFGMSWVRQAPGKGLEWVSSISGSGRDTLYAESVKGRFTISRDNA |
| | protein | KTTLYLQMNSLRPEDTAVYYCTIGGSLSVSSQGTLVTVSSSGGPGPAGMKGLPG |
| | | Shgtviesleslnnyfnssgidveekslfldiwrnwqkdgdmkilqsqiisfylrlfevlkdnqaisnnisvieshlittffsnsk |
| | | akkdafmsiakfevnnpqvqrqafnelirvvhqllpesslrkrkrsrcSGGPGPAGMKGLPGSEVQLVES |
| | | GGGLVQPGNSLRLSCAASGFTFSKFGMSWVRQAPGKGLEWVSSISGSGRDTLYA |
| | | ESVKGRFTISRDNAKTTLYLQMNSLRPEDTAVYYCTIGGSLSVSSQGTLVTVSSS |
| | | GGPGPAGMKGLPGShgtviesleslnnyfnssgidveekslfldiwrnwqkdgdmkilqsqiisfylrlfevlkdn |
| | | qaisnnisvieshlittffsnskakkdafmsiakfevnnpqvqrqafnelirvvhqllpesslrkrkrsrcSGGPGPAGM |
| | | KGLPGSEVQLVESGGGLVQPGNSLRLSCAASGFTFSKFGMSWVRQAPGKGLEW |
| | | VSSISGSGRDTLYAESVKGRFTISRDNAKTTLYLQMNSLRPEDTAVYYCTIGGSL |
| | | SVSSQGTLVTVSSHHHHHHEPEA |
| 113 | ACP34 | mdmrvpaqllgllllwlrgarcrvipvsgparclsqsrnllkttddmvktareklkhysctaedidheditrdqtstlktclplel |
| | Mouse | hknesclatretssttrgsclppqktslmmtlclgsiyedlkmyqtefqainaalqnhnhqqiildkgmlvaidelmqslnhn |
| | IL-12 | getlrqkppvgeadpyrvkmklcillhafstrvvtinrvmgylssaSGGPGPAGMKGLPGSmwelekdvyvv |
| | fusion | evdwtpdapgetvnltcdtpeedditwtsdqrhgvigsgktltitvkefldagqytchkggetlshshlllhkkengiwsteil |
| | protein | knfknktflkceapnysgrftcswlvqrnmdlkfnikssssspdsravtcgmaslsaekvtldqrdyekysvscqedvtcpt |
| | | aeetlpielalearqqnkyenystsffirdiikpdppknlqmkplknsqvevsweypdswstphsyfslkffvriqrkkek |
| | | mketeegcnqkgaflvektstevqckggnvcvqaqdryynsscskwacvpcrvrsHHHHHH |
| 114 | ACP35 | mdmrvpaqllgllllwlrgarcrvipvsgparclsqsrnllkttddmvktareklkhysctaedidheditrdqtstlktclplel |
| | Mouse | hknesclatretssttrgsclppqktslmmtlclgsiyedlkmyqtefqainaalqnhnhqqiildkgmlvaidelmqslnhn |
| | IL-12 | getlrqkppvgeadpyrvkmklcillhafstrvvtinrvmgylssaggggsggggsggggsSGGPGPAGMKGLP |
| | fusion | GSggggsggggsggggsmwelekdvyvvevdwtpdapgetvnltcdtpeedditwtsdqrhgvigsgktltitvkefld |
| | protein | agqytchkggetlshshlllhkkengiwsteilknfknktflkceapnysgrftcswlvqrnmdlkfnikssssspdsravtc |
| | | gmaslsaekvtldqrdyekysvscqedvtcptaeetlpielalearqqnkyenystsffirdiikpdppknlqmkplknsqv |
| | | evsweypdswstphsyfslkffvriqrkkekmketeegcnqkgaflvektstevqckggnvcvqaqdryynsscskwac |
| | | vpcrvrsHHHHHH |
| 115 | ACP36 | mdmrvpaqllgllllwlrgarcEVQLVESGGGLVQPGNSLRLSCAASGFTFSKFGMSWVRQ |
| | Mouse | APGKGLEWVSSISGSGRDTLYAESVKGRFTISRDNAKTTLYLQMNSLRPEDTAV |
| | IL-12 | YYCTIGGSLSVSSQGTLVTVSSSGGPGPAGMKGLPGSmwelekdvyvvevdwtpdapgetv |
| | fusion | nltcdtpeedditwtsdqrhgvigsgktltitvkefldagqytchkggetlshshlllhkkengiwsteilknfknktflkceap |
| | protein | nysgrftcswlvqrnmdlkfnikssssspdsravtcgmaslsaekvtldqrdyekysvscqedvtcptaeetlpielalearq |
| | | qnkyenystsffirdiikpdppknlqmkplknsqvevsweypdswstphsyfslkffvriqrkkekmketeegcnqkga |
| | | flvektstevqckggnvcvqaqdryynsscskwacypcrvrsggggsggggsggggsrvipvsgparclsqsrnllkttdd |
| | | mvktareklkhysctaedidheditrdqtstlktclplelhknesclatretssttrgsclppqktslmmtlclgsiyedlkmyqt |
| | | efqainaalqnhnhqqiildkgmlvaidelmqslnhngetlrqkppvgeadpyrvkmklcillhafstrvvtinrvmgylss |
| | | aSGGPGPAGMKGLPGSEVQLVESGGGLVQPGNSLRLSCAASGFTFSKFGMSWVR |
| | | QAPGKGLEWVSSISGSGRDTLYAESVKGRFTISRDNAKTTLYLQMNSLRPEDTA |
| | | VYYCTIGGSLSVSSQGTLVTVSSHHHHHH |
| 116 | ACP37 | mdmrvpaqllgllllwlrgarcQVQLQESGGGLVQAGGSLRLSCAASGRIFSIDIMSWYRQA |
| | Mouse | PGKQRELVARITRGGTISYDDSVKGRFTISRDNAKNTVYLQMNSLKPEDTGVYY |
| | IL-12 | CNALYGTDYWGKGTQVTVSSggggsggggsggggsEVQLVESGGGLVQPGNSLRLSC |
| | fusion | AASGFTFSKFGMSWVRQAPGKGLEWVSSISGSGRDTLYAESVKGRFTISRDNAK |
| | protein | TTLYLQMNSLRPEDTAVYYCTIGGSLSVSSQGTLVTVSSSGGPGPAGMKGLPGS |
| | | mwelekdvyvvevdwtpdapgetvnltcdtpeedditwtsdqrhgvigsgktltitvkefldagqytchkggetlshshlll |
| | | hkkengiwsteilknfknktflkceapnysgrftcswlyqrnmdlkfnikssssspdsravtcgmaslsaekvtldqrdyek |
| | | ysvscqedvtcptaeetlpielalearqqnkyenystsffirdiikpdppknlqmkplknsqveysweypdswstphsyfsl |
| | | kffvriqrkkekmketeegcnqkgaflvektstevqckggnvcvqaqdryynsscskwacvpcrvrsggggsggggsg |
| | | gggsrvipvsgparclsqsrnllkttddmvktareklkhysctaedidheditrdqtstlktclplelhknesclatretssttrgsc |
| | | lppqktslmmtlclgsiyedlkmyqtefqainaalqnhnhqqiildkgmlvaidelmqslnhngetlrqkppvgeadpyr |
| | | vkmklcillhafstrvvtinrvmgylssaSGGPGPAGMKGLPGSEVQLVESGGGLVQPGNSLRL |
| | | SCAASGFTFSKFGMSWVRQAPGKGLEWVSSISGSGRDTLYAESVKGRFTISRDN |
| | | AKTTLYLQMNSLRPEDTAVYYCTIGGSLSVSSQGTLVTVSSHHHHHH |
| 117 | ACP79 | mdmrvpaqllgllllwlrgarcQVQLQESGGGLVQAGGSLRLSCAASGRIFSIDIMSWYRQA |
| | Mouse | PGKQRELVARITRGGTISYDDSVKGRFTISRDNAKNTVYLQMNSLKPEDTGVYY |
| | IL-12 | CNALYGTDYWGKGTQVTVSSggggsggggsggggsEVQLVESGGGLVQPGNSLRLSC |
| | fusion | AASGFTFSKFGMSWVRQAPGKGLEWVSSISGSGRDTLYAESVKGRFTISRDNAK |
| | protein | TTLYLQMNSLRPEDTAVYYCTIGGSLSVSSQGTLVTVSSSGGPGPAGMKGLPGS |
| | | mwelekdvyvvevdwtpdapgetvnltcdtpeedditwtsdqrhgvigsgktltitykefldagqytchkggetlshshlll |
| | | hkkengiwsteilknfknktflkceapnysgrftcswlvqrnmdlkfnikssssspdsravtcgmaslsaekvtldqrdyek |
| | | ysvscqedvtcptaeetlpielalearqqnkyenystsffirdiikpdppknlqmkplknsqvevsweypdswstphsyfsl |
| | | kffvriqrkkekmketeegcnqkgaflvektstevqckggnvcvqaqdryynsscskwacvpcrvrsggggsggggsg |
| | | gggsrvipvsgparclsqsrnllkttddmvktareklkhysctaedidheditrdqtstlktclplelhknesclatretssttrgsc |
| | | lppqktslmmtlclgsiyedlkmyqtefqainaalqnhnhqqiildkgmlvaidelmqslnhngetlrqkppvgeadpyr |
| | | vkmklcillhafstrvvtinrvmgylssaSGGPGPAGMKGLPGSEVQLVESGGGLVQPGNSLRL |
| | | SCAASGFTFSKFGMSWVRQAPGKGLEWVSSISGSGRDTLYAESVKGRFTISRDN |
| | | AKTTLYLQMNSLRPEDTAVYYCTIGGSLSVSSQGTLVTVSSHHHHHH |
| 118 | ACP80 | mdmrvpaqllgllllwlrgarcEVQLVESGGGLVQPGNSLRLSCAASGFTFSKFGMSWVRQ |
| | Mouse | APGKGLEWVSSISGSGRDTLYAESVKGRFTISRDNAKTTLYLQMNSLRPEDTAV |
| | IL-12 | YYCTIGGSLSVSSQGTLVTVSSSGGPGPAGMKGLPGSmwelekdvyvvevdwtpdapgetv |
| | fusion | nltcdtpeedditwtsdqrhgvigsgktltitvkefldagqytchkggetlshshlllhkkengiwsteilknfknktflkceap |
| | protein | nysgrftcswlvqrnmdlkfnikssssspdsravtcgmaslsaekvtldqrdyekysvscqedvtcptaeetlpielalearq |
| | | qnkyenystsffirdiikpdppknlqmkplknsqvevsweypdswstphsyfslkffvriqrkkekmketeegcnqkga |
| | | flvektstevqckggnvcvqaqdryynsscskwacvpcrvrsggggsggggsggggsrvipvsgparclsqsrnllkttdd |
| | | myktareklkhysctaedidheditrdqtstlktclplelhknesclatretssttrgsclppqktslmmtlclgsiyedlkmyqt |
| | | efqainaalqnhnhqqiildkgmlvaidelmqslnhngetlrqkppvgeadpyrvkmklcillhafstrvvtinrvmgylss |
| | | aSGGPGPAGMKGLPGSEVQLVESGGGLVQPGNSLRLSCAASGFTFSKFGMSWVR |
| | | QAPGKGLEWVSSISGSGRDTLYAESVKGRFTISRDNAKTTLYLQMNSLRPEDTA |
| | | VYYCTIGGSLSVSSQGTLVTVSSggggsggggsggggsQVQLQESGGGLVQAGGSLRLS |
| | | CAASGRIFSIDIMSWYRQAPGKQRELVARITRGGTISYDDSVKGRFTISRDNAKN |
| | | TVYLQMNSLKPEDTGVYYCNALYGTDYWGKGTQVTVSSHHHHHH |
| 119 | ACP91 | mdmrvpaqllgllllwlrgarciwelkkdvyvveldwypdapgemvvltcdtpeedgitwtldqssevlgsgktltiqvke |
| | Chimeric | fgdagqytchkggevlshsllllhkkedgiwstdilkdqkepknktflrceaknysgrftcwwlttistdltfsvkssrgssdp |
| | IL-12 | qgvtcgaatlsaervrgdnkeyeysvecqedsacpaaeeslpievmvdavhklkyenytssffirdiikpdppknlqlkplk |
| | fusion | nsrqvevsweypdtwstphsyfsltfcvqvqgkskrekkdrvftdktsatvicrknasisvraqdryyssswsewasvpcs |
| | protein | ggggsggggsggggsrvipvsgparclsqsrnllkttddmvktareklkhysctaedidheditrdqtstlktclplelhknes |
| | | clatretssttrgsclppqktslmmtlclgsiyedlkmyqtefqainaalqnhnhqqiildkgmlvaidelmqslnhngetltrq |
| | | kppvgeadpyrvkmklcillhafstrvvtinrvmgylssaggggsggggsggggsggggsggggsggggsggggsggg |
| | | gsggggsQSVLTQPPSVSGAPGQRVTISCSGSRSNIGSNTVKWYQQLPGTAPKLLIY |
| | | YNDQRPSGVPDRFSGSKSGTSASLAITGLQAEDEADYYCQSYDRYTHPALLFGT |
| | | GTKVTVLggggsggggsggggsQVQLVESGGGVVQPGRSLRLSCAASGFTFSSYGMH |
| | | WVRQAPGKGLEWVAFIRYDGSNKYYADSVKGRFTISRDNSKNTLYLQMNSLRA |
| | | EDTAVYYCKTHGSHDNWGQGTMVTVSSggggsggggsggggsEVQLVESGGGLVQP |
| | | GNSLRLSCAASGFTFSKFGMSWVRQAPGKGLEWVSSISGSGRDTLYAESVKGRF |
| | | TISRDNAKTTLYLQMNSLRPEDTAVYYCTIGGSLSVSSQGTLVTVSSHHHHHHEP |
| | | EA |
| 120 | ACP136 | mdmrvpaqllgllllwlrgarciwelkkdvyvveldwypdapgemvvltcdtpeedgitwtldqssevlgsgktltiqvke |
| | Chimeric | fgdagqytchkggevlshsllllhkkedgiwstdilkdqkepknktflrceaknysgrftcwwlttistdltfsvkssrgssdp |
| | IL-12 | qgvtcgaatlsaervrgdnkeyeysvecqedsacpaaeeslpievmvdavhklkyenytssffirdiikpdppknlqlkplk |
| | fusion | nsrqvevsweypdtwstphsyfsltfcvqvqgkskrekkdrvftdktsatvicrknasisvraqdryyssswsewasvpcs |
| | protein | ggggsggggsggggsrvipvsgparclsqsrnllkttddmvktareklkhysctaedidheditrdqtstlktclplelhknes |
| | | clatretssttrgsclppqktslmmticlgsiyedlkmyqtefqainaalqnhnhqqiildkgmlvaidelmqslnhngetlrq |
| | | kppvgeadpyrvkmklcillhafstrvvtinrvmgylssaSGGPGPAGMKGLPGSggggsggggsggggsgg |
| | | ggsggggsggggsQSVLTQPPSVSGAPGQRVTISCSGSRSNIGSNTVKWYQQLPGTAP |
| | | KLLIYYNDQRPSGVPDRFSGSKSGTSASLAITGLQAEDEADYYCQSYDRYTHPAL |
| | | LFGTGTKVTVLggggsggggsggggsQVQLVESGGGVVQPGRSLRLSCAASGFTFSSY |
| | | GMHWVRQAPGKGLEWVAFIRYDGSNKYYADSVKGRFTISRDNSKNTLYLQMN |
| | | SLRAEDTAVYYCKTHGSHDNWGQGTMVTVSSHREIREIHEPEA |
| 121 | ACP138 | mdmrvpaqllgllllwlrgarciwelkkdvyvveldwypdapgemvvltcdtpeedgitwtldqssevlgsgktltiqvke |
| | Chimeric | fgdagqytchkggevlshsllllhkkedgiwstdilkdqkepknktflrceaknysgrftcwwlttistdltfsvkssrgssdp |
| | IL-12 | qgvtcgaatlsaervrgdnkeyeysvecqedsacpaaeeslpievmvdavhklkyenytssffirdiikpdppknlqlkplk |
| | fusion | nsrqvevsweypdtwstphsyfsltfcvqvqgkskrekkdrvftdktsatvicrknasisvraqdryyssswsewasvpcs |
| | protein | ggggsggggsggggsrvipvsgparclsqsrnllkttddmvktareklkhysctaedidheditrdqtstlktclplelhknes |
| | | clatretssttrgsclppqktslmmtlclgsiyedlkmyqtefqainaalqnhnhqqiildkgmlvaidelmqslnhngetlrq |
| | | kppvgeadpyrvkmklcillhafstrvvtinrvmgylssaSGGPGPAGMKGLPGSggggsggggsggggsgg |
| | | ggsggggsggggsQSVLTQPPSVSGAPGQRVTISCSGSRSNIGSNTVKWYQQLPGTAP |
| | | KLLIYYNDQRPSGVPDRFSGSKSGTSASLAITGLQAEDEADYYCQSYDRYTHPAL |
| | | LFGTGTKVTVLggggsggggsggggsQVQLVESGGGVVQPGRSLRLSCAASGFTFSSY |
| | | GMHWVRQAPGKGLEWVAFIRYDGSNKYYADSVKGRFTISRDNSKNTLYLQMN |
| | | SLRAEDTAVYYCKTHGSHDNWGQGTMVTVSSggggsggggsggggsEVQLVESGGGL |
| | | VQPGNSLRLSCAASGFTFSKFGMSWVRQAPGKGLEWVSSISGSGRDTLYAESVK |
| | | GRFTISRDNAKTTLYLQMNSLRPEDTAVYYCTIGGSLSVSSQGTLVTVSSggggsgg |
| | | ggsggggsQVQLQESGGGLAQAGGSLSLSCAASGFTVSNSVMAWYRQTPGKQREF |
| | | VAIINSVGSTNYADSVKGRFTISRDNAKNTVYLQMNNLKPEDTAVYVCNRNFDR |
| | | IYWGQGTQVTVSSHEIREIHHEPEA |
| 122 | ACP139 | mdmrvpaqllgllllwlrgarcQVQLQESGGGLAQAGGSLSLSCAASGFTVSNSVMAWYR |
| | Chimeric | QTPGKQREFVAIINSVGSTNYADSVKGRFTISRDNAKNTVYLQMNNLKPEDTAV |
| | IL-12 | YVCNRNFDRIYWGQGTQVTVSSggggsggggsggggsiwelkkdvyvveldwypdapgemvvltcd |
| | fusion | tpeedgitwtldqssevlgsgktltiqvkefgdagqytchkggevlshsllllhkkedgiwstdilkdqkepknktflrceakn |
| | protein | ysgrftcwwlttistdltfsvkssrgssdpqgvtcgaatlsaervrgdnkeyeysvecqedsacpaaeeslpievmvdavhkl |
| | | kyenytssffirdiikpdppknlqlkplknsrqvevsweypdtwstphsyfsltfcvqvqgkskrekkdrvftdktsatvicr |
| | | knasisvraqdryyssswsewasvpcsggggsggggsggggsrvipvsgparclsqsrnllkttddmvktareklkhysct |
| | | aedidheditrdqtstlktclplelhknesclatretssttrgsclppqktslmmtlclgsiyedlkmyqtefqainaalqnhnhq |
| | | qiildkgmlvaidelmqslnhngetlrqkppvgeadpyrvkmklcillhafstrvvtinrvmgylssaSGGPGPAGM |
| | | KGLPGSggggsggggsggggsggggsggggsggggsQSVLTQPPSVSGAPGQRVTISCSGSRS |
| | | NIGSNTVKWYQQLPGTAPKLLIYYNDQRPSGVPDRFSGSKSGTSASLAITGLQAE |
| | | DEADYYCQSYDRYTHPALLFGTGTKVTVLggggsggggsggggsQVQLVESGGGVVQ |
| | | PGRSLRLSCAASGFTFSSYGMHWVRQAPGKGLEWVAFIRYDGSNKYYADSVKG |
| | | RFTISRDNSKNTLYLQMNSLRAEDTAVYYCKTHGSHDNWGQGTMVTVSSggggs |
| | | ggggsggggsEVQLVESGGGLVQPGNSLRLSCAASGFTFSKFGMSWVRQAPGKGLE |
| | | WVSSISGSGRDTLYAESVKGRFTISRDNAKTTLYLQMNSLRPEDTAVYYCTIGGS |
| | | LSVSSQGTLVTVSSHHHHHHEPEA |
| 123 | ACP140 | mdmrvpaqllgllllwlrgarcQVQLQESGGGLAQAGGSLSLSCAASGFTVSNSVMAWYR |
| | Chimeric | QTPGKQREFVAIINSVGSTNYADSVKGRFTISRDNAKNTVYLQMNNLKPEDTAV |
| | IL-12 | YVCNRNFDRIYWGQGTQVTVSSSGGPGPAGMKGLPGSiwelkkdvyvveldwypdapge |
| | fusion | mvvltcdtpeedgitwtldqssevlgsgktltiqvkefgdagqytchkggevlshsllllhkkedgiwstdilkdqkepknkt |
| | protein | flrceaknysgrftcwwlttistdltfsvkssrgssdpqgvtcgaatlsaervrgdnkeyeysvecqedsacpaaeeslpiev |
| | | mvdavhklkyenytssffirdiikpdppknlqlkplknsrqvevsweypdtwstphsyfsltfcvqvqgkskrekkdrvft |
| | | dktsatvicrknasisvraqdryyssswsewasvpcsggggsggggsggggsrvipvsgparclsqsrnllkttddmvkta |
| | | reklkhysctaedidheditrdqtstlktclplelhknesclatretssttrgsclppqktslmmtlclgsiyedlkmyqtefqain |
| | | aalqnhnhqqiildkgmlvaidelmqslnhngetlrqkppvgeadpyrvkmklcillhafstrvvtinrvmgylssaSGG |
| | | PGPAGMKGLPGSggggsggggsggggsggggsggggsggggsQSVLTQPPSVSGAPGQRVTIS |
| | | CSGSRSNIGSNTVKWYQQLPGTAPKLLIYYNDQRPSGVPDRFSGSKSGTSASLAI |
| | | TGLQAEDEADYYCQSYDRYTHPALLFGTGTKVTVLggggsggggsggggsQVQLVES |
| | | GGGVVQPGRSLRLSCAASGFTFSSYGMHWVRQAPGKGLEWVAFIRYDGSNKY |
| | | YADSVKGRFTISRDNSKNTLYLQMNSLRAEDTAVYYCKTHGSHDNWGQGTMV |
| | | TVSSggggsggggsggggsEVQLVESGGGLVQPGNSLRLSCAASGFTFSKFGMSWVRQ |
| | | APGKGLEWVSSISGSGRDTLYAESVKGRFTISRDNAKTTLYLQMNSLRPEDTAV |
| | | YYCTIGGSLSVSSQGTLVTVSSHHHHHHEPEA |
| 124 | ACP38 | mdmrvpaqllgllllwlrgarcaptssstkktqlqlehllldlqmilnginnyknpkltrmltfkfympkkatelkhlqcleee |
| | IL-2 | lkpleevlnlaqsknfhlrprdlisninvivlelkgsettfmceyadetativeflnrwitfcqsiistltSGGPGPAGMK |
| | fusion | GLPGSEVQLVESGGGLVQPGGSLRLSCAASGFTFSSYTLAWVRQAPGKGLEWV |
| | protein | AAIDSSSYTYSPDTVRGRFTISRDNAKNSLYLQMNSLRAEDTAVYYCARDSNWD |
| | | ALDYWGQGTTVTVSSGGGGSGGGGSGGGGSDIQMTQSPSSLSASVGDRVTITCK |
| | | ASQNVGTNVGWYQQKPGKAPKALIYSASFRYSGVPSRFSGSGSGTDFTLTISSLQ |
| | | PEDFATYYCQQYYTYPYTFGGGTKVEIKggggsggggsggggsEVQLVESGGGLVQPG |
| | | NSLRLSCAASGFTFSKFGMSWVRQAPGKGLEWVSSISGSGRDTLYAESVKGRFTI |
| | | SRDNAKTTLYLQMNSLRPEDTAVYYCTIGGSLSVSSQGTLVTVSSggggsggggsggg |
| | | gsQVQLQESGGGLVQAGGSLRLSCAASGRIFSIDIMSWYRQAPGKQRELVARITR |
| | | GGTISYDDSVKGRFTISRDNAKNTVYLQMNSLKPEDTGVYYCNALYGTDYWGK |
| | | GTQVTVSSHHHHHH |
| 125 | ACP39 | mdmrvpaqllgllllwlrgarcQVQLQESGGGLVQAGGSLRLSCAASGRIFSIDIMSWYRQA |
| | IL-2 | PGKQRELVARITRGGTISYDDSVKGRFTISRDNAKNTVYLQMNSLKPEDTGVYY |
| | fusion | CNALYGTDYWGKGTQVTVSSSGGPGPAGMKGLPGSEVQLVESGGGLVQPGNSL |
| | protein | RLSCAASGFTFSKFGMSWVRQAPGKGLEWVSSISGSGRDTLYAESVKGRFTISR |
| | | DNAKTTLYLQMNSLRPEDTAVYYCTIGGSLSVSSQGTLVTVSSSGGPGPAGMKG |
| | | LPGSEVQLVESGGGLVQPGGSLRLSCAASGFTFSSYTLAWVRQAPGKGLEWVA |
| | | AIDSSSYTYSPDTVRGRFTISRDNAKNSLYLQMNSLRAEDTAVYYCARDSNWDA |
| | | LDYWGQGTTVTVSSGGGGSGGGGSGGGGSDIQMTQSPSSLSASVGDRVTITCKA |
| | | SQNVGTNVGWYQQKPGKAPKALIYSASFRYSGVPSRFSGSGSGTDFTLTISSLQP |
| | | EDFATYYCQQYYTYPYTFGGGTKVEIKSGGPGPAGMKGLPGSaptssstkktqlqlehllld |
| | | lqmilnginnyknpkltrmltffympkkatelkhlqcleeelkpleevlnlaqsknfhlrprdlisninvivlelkgsettfm |
| | | ceyadetativeflnrwitfcqsiistltHHHHHH** |
| 126 | ACP40 | mdmrvpaqllgllllwlrgarcelcdddppeiphatfkamaykegtmlnceckrgfrriksgslymlctgnsshsswdnq |
| | IL-2 | cqctssatrnttkqvtpqpeeqkerkttemqspmqpvdqaslpghcrepppweneateriyhfvvgqmvyyqcvqgyr |
| | fusion | alhrgpaesvckmthgktrwtqpqlictgemetsqfpgeekpqaspegrpesetsclvtttdfqiqtemaatmetsiftteyq |
| | protein | ggggsggggsggggsggggsggggsggggsSGGPGPAGMKGLPGSaptssstkktqlqlehllldlqmilngi |
| | | nnyknpkltrmltfkfympkkatelkhlqcleeelkpleevlnlaqsknfhlrprdlisninvivlelkgsettfmceyadetat |
| | | iveflnrwitfcqsiistltHHHHHH |
| 127 | ACP41 | mdmrvpaqllgllllwlrgarcaptssstkktqlqlehllldlqmilnginnyknpkltrmltfkfympkkatelkhlqcleee |
| | IL-2 | lkpleevlnlaqsknfhlrprdlisninvivlelkgsettfmceyadetativeflnrwitfcqsiistltSGGPGPAGMK |
| | fusion | GLPGSggggsggggsggggsggggsggggsggggselcdddppeiphatfkamaykegtmlnceckrgfrriksgs |
| | protein | lymlctgnsshsswdnqcqctssatrnttkqvtpqpeeqkerkttemqspmqpvdqaslpghcrepppweneateriyhf |
| | | vvgqmvyyqcvqgyralhrgpaesvckmthgktrwtqpqlictgemetsqfpgeekpqaspegrpesetsclvtttdfqi |
| | | qtemaatmetsiftteyqHHHHHH |
| 128 | ACP42 | mdmrvpaqllgllllwlrgarcEVQLVESGGGLVQPGNSLRLSCAASGFTFSKFGMSWVRQ |
| | IL-2 | APGKGLEWVSSISGSGRDTLYAESVKGRFTISRDNAKTTLYLQMNSLRPEDTAV |
| | fusion | YYCTIGGSLSVSSQGTLVTVSSggggsggggsggggselcdddppeiphatfkamaykegtmlnceckr |
| | protein | gfrriksgslymlctgnsshsswdnqcqctssatrnttkqvtpqpeeqkerkttemqspmqpvdqaslpghcrepppwen |
| | | eateriyhfvvgqmvyyqcvqgyralhrgpaesvckmthgktrwtqpqlictgemetsqfpgeekpqaspegrpesets |
| | | clvtttdfqiqtemaatmetsiftteyqggggsggggsggggsggggsggggsggggsSGGPGPAGMKGLPGS |
| | | aptssstkktqlqlehllldlqmilnginnyknpkltrmltfkfympkkatelkhlqcleeelkpleevlnlaqsknfhlrprdli |
| | | sninvivlelkgsettfmceyadetativeflnrwitfcqsiistltHHHHHH |
| 129 | ACP43 | mdmrvpaqllgllllwlrgarcaptssstkktqlqlehllldlqmilnginnyknpkltrmltfkfympkkatelkhlqcleee |
| | IL-2 | lkpleevlnlaqsknfhlrprdlisninvivlelkgsettfmceyadetativeflnrwitfcqsiistltSGGPGPAGMK |
| | fusion | GLPGSggggsggggsggggsggggsggggsggggselcdddppeiphatfkamaykegtmlnceckrgfrriksgs |
| | protein | lymlctgnsshsswdnqcqctssatrnttkqvtpqpeeqkerkttemqspmqpvdqaslpghcrepppweneateriyhf |
| | | vvgqmvyyqcvqgyralhrgpaesvckmthgktrwtqpqlictgemetsqfpgeekpqaspegrpesetsclvtttdfqi |
| | | qtemaatmetsiftteyqggggsggggsggggsEVQLVESGGGLVQPGNSLRLSCAASGFTFSKF |
| | | GMSWVRQAPGKGLEWVSSISGSGRDTLYAESVKGRFTISRDNAKTTLYLQMNS |
| | | LRPEDTAVYYCTIGGSLSVSSQGTLVTVSSHHHHHH |
| 130 | ACP44 | mdmrvpaqllgllllwlrgarcaptssstkktqlqlehllldlqmilnginnyknpkltrmltfkfympkkatelkhlqcleee |
| | IL-2 | lkpleevlnlaqsknfhlrprdlisninvivlelkgsettfmceyadetativeflnrwitfcqsiistltSGGPGPAGMK |
| | fusion | GLPGSggggsggggsggggsggggsggggsggggselcdddppeiphatfkamaykegtmlnceckrgfrriksgs |
| | protein | lymlctgnsshsswdnqcqctssatrnttkqvtpqpeeqkerkttemqspmqpvdqaslpghcrepppweneateriyhf |
| | | vvgqmvyyqcvqgyralhrgpaesvckmthgktrwtqpqlictgemetsqfpgeekpqaspegrpesetsclvtttdfqi |
| | | qtemaatmetsiftteyqSGGPGPAGMKGLPGSEVQLVESGGGLVQPGNSLRLSCAASGF |
| | | TFSKFGMSWVRQAPGKGLEWVSSISGSGRDTLYAESVKGRFTISRDNAKTTLYL |
| | | QMNSLRPEDTAVYYCTIGGSLSVSSQGTLVTVSSFIRREIREI |
| 131 | ACP45 | mdmrvpaqllgllllwlrgarcEVQLVESGGGLVQPGNSLRLSCAASGFTFSKFGMSWVRQ |
| | IL-2 | APGKGLEWVSSISGSGRDTLYAESVKGRFTISRDNAKTTLYLQMNSLRPEDTAV |
| | fusion | YYCTIGGSLSVSSQGTLVTVSSSGGPGPAGMKGLPGSEVQLVESGGGLVQPGGS |
| | protein | LRLSCAASGFTFSSYTLAWVRQAPGKGLEWVAAIDSSSYTYSPDTVRGRFTISRD |
| | | NAKNSLYLQMNSLRAEDTAVYYCARDSNWDALDYWGQGTTVTVSSGGGGSG |
| | | GGGSGGGGSDIQMTQSPSSLSASVGDRVTITCKASQNVGTNVGWYQQKPGKAP |
| | | KALIYSASFRYSGVPSRFSGSGSGTDFTLTISSLQPEDFATYYCQQYYTYPYTFGG |
| | | GTKVEIKggggsggggsggggsggggsggggsggggsSGGPGPAGMKGLPGSaptssstkktqlqlehl |
| | | lldlqmilnginnyknpkltrmltfkfympkkatelkhlqcleeelkpleevlnlaqsknfhlrprdlisninvivlelkgsettf |
| | | mceyadetativeflnrwitfcqsiistltHHHHHH |
| 132 | ACP46 | mdmrvpaqllgllllwlrgarcaptssstkktqlqlehllldlqmilnginnyknpkltrmltfkfympkkatelkhlqcleee |
| | IL-2 | lkpleevlnlaqsknfhlrprdlisninvivlelkgsettfmceyadetativeflnrwitfcqsiistltSGGPGPAGMK |
| | fusion | GLPGSggggsggggsggggsggggsggggsggggsEVQLVESGGGLVQPGGSLRLSCAASGF |
| | protein | TFSSYTLAWVRQAPGKGLEWVAAIDSSSYTYSPDTVRGRFTISRDNAKNSLYLQ |
| | | MNSLRAEDTAVYYCARDSNWDALDYWGQGTTVTVSSsggpgpagmkglpgsDIQMT |
| | | QSPSSLSASVGDRVTITCKASQNVGTNVGWYQQKPGKAPKALIYSASFRYSGVP |
| | | SRFSGSGSGTDFTLTISSLQPEDFATYYCQQYYTYPYTFGGGTKVEIKggggsggggs |
| | | ggggsEVQLVESGGGLVQPGNSLRLSCAASGFTFSKFGMSWVRQAPGKGLEWVSS |
| | | ISGSGRDTLYAESVKGRFTISRDNAKTTLYLQMNSLRPEDTAVYYCTIGGSLSVS |
| | | SQGTLVTVSSggggsggggsggggsQVQLQESGGGLVQAGGSLRLSCAASGRIFSIDIM |
| | | SWYRQAPGKQRELVARITRGGTISYDDSVKGRFTISRDNAKNTVYLQMNSLKPE |
| | | DTGVYYCNALYGTDYWGKGTQVTVSSHHHHHH |
| 133 | ACP47 | mdmrvpaqllgllllwlrgarcQVQLQESGGGLVQAGGSLRLSCAASGRIFSIDIMSWYRQA |
| | IL-2 | PGKQRELVARITRGGTISYDDSVKGRFTISRDNAKNTVYLQMNSLKPEDTGVYY |
| | fusion | CNALYGTDYWGKGTQVTVSSggggsggggsggggsaptssstkktqlqlehllldlqmilnginnyknpk |
| | protein | ltrmltfkfympkkatelkhlqcleeelkpleevlnlaqsknfhlrprdlisninvivlelkgsettfmceyadetativeflnrw |
| | | itfcqsiistltSGGPGPAGMKGLPGSEVQLVESGGGLVQPGNSLRLSCAASGFTFSKFG |
| | | MSWVRQAPGKGLEWVSSISGSGRDTLYAESVKGRFTISRDNAKTTLYLQMNSLR |
| | | PEDTAVYYCTIGGSLSVSSQGTLVTVSSggggsggggsggggsggggsggggsggggsEVQLV |
| | | ESGGGLVQPGGSLRLSCAASGFTFSSYTLAWVRQAPGKGLEWVAAIDSSSYTYS |
| | | PDTVRGRFTISRDNAKNSLYLQMNSLRAEDTAVYYCARDSNWDALDYWGQGT |
| | | TVTVSSGGGGSGGGGSGGGGSDIQMTQSPSSLSASVGDRVTITCKASQNVGTNV |
| | | GWYQQKPGKAPKALIYSASFRYSGVPSRFSGSGSGTDFTLTISSLQPEDFATYYC |
| | | QQYYTYPYTFGGGTKVEIKHHHHHH |
| 134 | ACP48 | mdmrvpaqllgllllwlrgarcaptssstkktqlqlehllldlqmilnginnyknpkltrmltfkfympkkatelkhlqcleee |
| | IL-2 | lkpleevlnlaqsknfhlrprdlisninvivlelkgsettfmceyadetativeflnrwitfcqsiistltSGGPGPAGMK |
| | fusion | GLPGSEVQLVESGGGLVQPGGSLRLSCAASGFTFSSYTLAWVRQAPGKGLEWV |
| | protein | AAIDSSSYTYSPDTVRGRFTISRDNAKNSLYLQMNSLRAEDTAVYYCARDSNWD |
| | | ALDYWGQGTTVTVSSGGGGSGGGGSGGGGSDIQMTQSPSSLSASVGDRVTITCK |
| | | ASQNVGTNVGWYQQKPGKAPKALIYSASFRYSGVPSRFSGSGSGTDFTLTISSLQ |
| | | PEDFATYYCQQYYTYPYTFGGGTKVEIKggggsggggsggggsEVQLVESGGGLVQPG |
| | | NSLRLSCAASGFTFSKFGMSWVRQAPGKGLEWVSSISGSGRDTLYAESVKGRFTI |
| | | SRDNAKTTLYLQMNSLRPEDTAVYYCTIGGSLSVSSQGTLVTVSSHHHHHH |
| 135 | ACP49 | mdmrvpaqllgllllwlrgarcaptssstkktqlqlehllldlqmilnginnyknpkltrmltfkfympkkatelkhlqcleee |
| | IL-2 | lkpleevlnlaqsknfhlrprdlisninvivlelkgsettfmceyadetativeflnrwitfcqsiistltSGGPGPAGMK |
| | fusion | GLPGSggggsggggsggggsggggsggggsggggsEVQLVESGGGLVQPGGSLRLSCAASGF |
| | protein | TFSSYTLAWVRQAPGKGLEWVAAIDSSSYTYSPDTVRGRFTISRDNAKNSLYLQ |
| | | MNSLRAEDTAVYYCARDSNWDALDYWGQGTTVTVSSGGGGSGGGGSGGGGS |
| | | DIQMTQSPSSLSASVGDRVTITCKASQNVGTNVGWYQQKPGKAPKALIYSASFR |
| | | YSGVPSRFSGSGSGTDFTLTISSLQPEDFATYYCQQYYTYPYTFGGGTKVEIKggg |
| | | gsggggsggggsEVQLVESGGGLVQPGNSLRLSCAASGFTFSKFGMSWVRQAPGKGL |
| | | EWVSSISGSGRDTLYAESVKGRFTISRDNAKTTLYLQMNSLRPEDTAVYYCTIGG |
| | | SLSVSSQGTLVTVSSHHHHHH |
| 136 | ACP92 | mdmrvpaqllgllllwlrgarcEVQLVESGGGLVQPGNSLRLSCAASGFTFSKFGMSWVRQ |
| | IL-2 | APGKGLEWVSSISGSGRDTLYAESVKGRFTISRDNAKTTLYLQMNSLRPEDTAV |
| | fusion | YYCTIGGSLSVSSQGTLVTVSSSGGPGPAGMKGLPGSaptssstkktqlqlehllldlqmilngin |
| | protein | nyknpkltrmltfkfympkkatelkhlqcleeelkpleevlnlaqsknfhlrprdlisninvivlelkgsettfmceyadetati |
| | | veflnrwitfcqsiistltSGGPGPAGMKGLPGSEVQLVESGGGLVQPGNSLRLSCAASGFT |
| | | FSKFGMSWVRQAPGKGLEWVSSISGSGRDTLYAESVKGRFTISRDNAKTTLYLQ |
| | | MNSLRPEDTAVYYCTIGGSLSVSSQGTLVTVSSHHHHHH |
| 137 | ACP93 | mdmrvpaqllgllllwlrgarcQVQLQESGGGLVQAGGSLRLSCAASGRIFSIDIMSWYRQA |
| | IL-2 | PGKQRELVARITRGGTISYDDSVKGRFTISRDNAKNTVYLQMNSLKPEDTGVYY |
| | fusion | CNALYGTDYWGKGTQVTVSSgsgsgsgsgsgsgsgsEVQLVESGGGLVQPGNSLRLSC |
| | protein | AASGFTFSKFGMSWVRQAPGKGLEWVSSISGSGRDTLYAESVKGRFTISRDNAK |
| | | TTLYLQMNSLRPEDTAVYYCTIGGSLSVSSQGTLVTVSSgsgsgsgsgsgsgsgsQVQLQ |
| | | ESGGGLVQAGGSLRLSCAASGRIFSIDIMSWYRQAPGKQRELVARITRGGTISYD |
| | | DSVKGRFTISRDNAKNTVYLQMNSLKPEDTGVYYCNALYGTDYWGKGTQVTV |
| | | SSgsgsgsgsgsgsgsgsEVQLVESGGGLVQPGGSLRLSCAASGFTFSSYTLAWVRQAP |
| | | GKGLEWVAAIDSSSYTYSPDTVRGRFTISRDNAKNSLYLQMNSLRAEDTAVYYC |
| | | ARDSNWDALDYWGQGTTVTVSSGGGGSGGGGSGGGGSDIQMTQSPSSLSASVG |
| | | DRVTITCKASQNVGTNVGWYQQKPGKAPKALIYSASFRYSGVPSRFSGSGSGTD |
| | | FTLTISSLQPEDFATYYCQQYYTYPYTFGGGTKVEIKSGGPGPAGMKGLPGSaptss |
| | | stkktqlqlehllldlqmilnginnyknpkltrmltfkfympkkatelkhlqcleeelkpleevlnlaqsknfhlrprdlisnin |
| | | vivlelkgsettfmceyadetativeflnrwitfcqsiistltHHHHHH |
| 138 | ACP94 | mdmrvpaqllgllllwlrgarcQVQLQESGGGLVQAGGSLRLSCAASGRIFSIDIMSWYRQA |
| | IL-2 | PGKQRELVARITRGGTISYDDSVKGRFTISRDNAKNTVYLQMNSLKPEDTGVYY |
| | fusion | CNALYGTDYWGKGTQVTVSSgsgsgsgsgsgsgsgsEVQLVESGGGLVQPGNSLRLSC |
| | protein | AASGFTFSKFGMSWVRQAPGKGLEWVSSISGSGRDTLYAESVKGRFTISRDNAK |
| | | TTLYLQMNSLRPEDTAVYYCTIGGSLSVSSQGTLVTVSSgsgsgsgsgsgsgsgsEVQLV |
| | | ESGGGLVQPGGSLRLSCAASGFTFSSYTLAWVRQAPGKGLEWVAAIDSSSYTYS |
| | | PDTVRGRFTISRDNAKNSLYLQMNSLRAEDTAVYYCARDSNWDALDYWGQGT |
| | | TVTVSSGGGGSGGGGSGGGGSDIQMTQSPSSLSASVGDRVTITCKASQNVGTNV |
| | | GWYQQKPGKAPKALIYSASFRYSGVPSRFSGSGSGTDFTLTISSLQPEDFATYYC |
| | | QQYYTYPYTFGGGTKVEIKSGGPGPAGMKGLPGSaptssstkktqlqlehllldlqmilnginnyk |
| | | npkltrmlafympkkatelkhlqcleeelkpleevlnlaqsknfhlrprdlisninvivlelkgsettfmceyadetativefl |
| | | nrwitfcqsiistltHHHHHH |
| 139 | ACP95 | mdmrvpaqllgllllwlrgarcQVQLQESGGGLVQAGGSLRLSCAASGRIFSIDIMSWYRQA |
| | IL-2 | PGKQRELVARITRGGTISYDDSVKGRFTISRDNAKNTVYLQMNSLKPEDTGVYY |
| | fusion | CNALYGTDYWGKGTQVTVSSgsgsgsgsgsgsgsgsEVQLVESGGGLVQPGNSLRLSC |
| | protein | AASGFTFSKFGMSWVRQAPGKGLEWVSSISGSGRDTLYAESVKGRFTISRDNAK |
| | | TTLYLQMNSLRPEDTAVYYCTIGGSLSVSSQGTLVTVSSSGGPGPAGMKGLPGSa |
| | | ptssstkktqlqlehllldlqmilnginnyknpkltrmltfkfympkkatelkhlqcleeelkpleevlnlaqsknfhlrprdlis |
| | | ninvivlelkgsettfmceyadetativeflnrwitfcqsiistltHHHHHH |
| 140 | ACP96 | mdmrvpaqllgllllwlrgarcQVQLQESGGGLVQAGGSLRLSCAASGRIFSIDIMSWYRQA |
| | IL-2 | PGKQRELVARITRGGTISYDDSVKGRFTISRDNAKNTVYLQMNSLKPEDTGVYY |
| | fusion | CNALYGTDYWGKGTQVTVSSSGGPGPAGMKGLPGSaptssstkktqlqlehllldlqmilngin |
| | protein | nyknpkltrmltfkfympkkatelkhlqcleeelkpleevlnlaqsknfhlrprdlisninvivlelkgsettfmceyadetati |
| | | veflnrwitfcqsiistltSGGPGPAGMKGLPGSEVQLVESGGGLVQPGNSLRLSCAASGFT |
| | | FSKFGMSWVRQAPGKGLEWVSSISGSGRDTLYAESVKGRFTISRDNAKTTLYLQ |
| | | MNSLRPEDTAVYYCTIGGSLSVSSQGTLVTVSSHHHHHH |
| 141 | ACP97 | mdmrvpaqllgllllwlrgarcQVQLQESGGGLVQAGGSLRLSCAASGRIFSIDIMSWYRQA |
| | IL-2 | PGKQRELVARITRGGTISYDDSVKGRFTISRDNAKNTVYLQMNSLKPEDTGVYY |
| | fusion | CNALYGTDYWGKGTQVTVSSggggsggggsggggsEVQLVESGGGLVQPGNSLRLSC |
| | protein | AASGFTFSKFGMSWVRQAPGKGLEWVSSISGSGRDTLYAESVKGRFTISRDNAK |
| | | TTLYLQMNSLRPEDTAVYYCTIGGSLSVSSQGTLVTVSSSGGPGPAGMKGLPGSa |
| | | ptssstkktqlqlehllldlqmilnginnyknpkltrmltfkfympkkatelkhlqcleeelkpleevlnlaqsknfhlrprdlis |
| | | ninvivlelkgsettmceyadetativeflnrwitfcqsiistltSGGPGPAGMKGLPGSEVQLVESGGGL |
| | | VQPGNSLRLSCAASGFTFSKFGMSWVRQAPGKGLEWVSSISGSGRDTLYAESVK |
| | | GRFTISRDNAKTTLYLQMNSLRPEDTAVYYCTIGGSLSVSSQGTLVTVSSHHHHH |
| | | H |
| 142 | ACP99 | mdmrvpaqllgllllwlrgarcQVQLQESGGGLVQAGGSLRLSCAASGRIFSIDIMSWYRQA |
| | IL-2 | PGKQRELVARITRGGTISYDDSVKGRFTISRDNAKNTVYLQMNSLKPEDTGVYY |
| | fusion | CNALYGTDYWGKGTQVTVSSggggsggggsggggsaptssstkktqlqlehllldlqmilnginnyknpk |
| | protein | ltrmltfkfympkkatelkhlqcleeelkpleevlnlaqsknfhlrprdlisninvivlelkgsettfmceyadetativeflnrw |
| | | itfcqsiistltSGGPGPAGMKGLPGSEVQLVESGGGLVQPGNSLRLSCAASGFTFSKFG |
| | | MSWVRQAPGKGLEWVSSISGSGRDTLYAESVKGRFTISRDNAKTTLYLQMNSLR |
| | | PEDTAVYYCTIGGSLSVSSQGTLVTVSSHHHHHH |
| 143 | ACP100 | mdmrvpaqllgllllwlrgarcQVQLQESGGGLVQAGGSLRLSCAASGRIFSIDIMSWYRQA |
| | IL-2 | PGKQRELVARITRGGTISYDDSVKGRFTISRDNAKNTVYLQMNSLKPEDTGVYY |
| | fusion | CNALYGTDYWGKGTQVTVSSggggsggggsggggsaptssstkktqlqlehllldlqmilnginnyknpk |
| | protein | ltrmltfkfympkkatelkhlqcleeelkpleevlnlaqsknfhlrprdlisninvivlelkgsettfmceyadetativeflnrw |
| | | tfcqsiistltHHHHHH |
| 144 | ACP101 | mdmrvpaqllgllllwlrgarcaptssstkktqlqlehllldlqmilnginnyknpkltrmltfkfympkkatelkhlqcleee |
| | IL-2 | lkpleevlnlaqsknfhlrprdlisninvivlelkgsettfmceyadetativeflnrwitfcqsiistltSGGPGPAGMK |
| | fusion | GLPGSEVQLVESGGGLVQPGNSLRLSCAASGFTFSKFGMSWVRQAPGKGLEWV |
| | protein | SSISGSGRDTLYAESVKGRFTISRDNAKTTLYLQMNSLRPEDTAVYYCTIGGSLS |
| | | VSSQGTLVTVSSHHHHHH |
| 145 | ACP102 | mdmrvpaqllgllllwlrgarcQVQLQESGGGLVQAGGSLRLSCAASGRIFSIDIMSWYRQA |
| | IL-2 | PGKQRELVARITRGGTISYDDSVKGRFTISRDNAKNTVYLQMNSLKPEDTGVYY |
| | fusion | CNALYGTDYWGKGTQVTVSSSGGPGPAGMKGLPGSaptssstkktqlqlehllldlqmilngin |
| | protein | nyknpkltrmltfkfympkkatelkhlqcleeelkpleevlnlaqsknfhlrprdlisninvivlelkgsettfmceyadetati |
| | | veflnrwitfcqsiistltSGGPGPAGMKGLPGSEVQLVESGGGLVQPGNSLRLSCAASGFT |
| | | FSKFGMSWVRQAPGKGLEWVSSISGSGRDTLYAESVKGRFTISRDNAKTTLYLQ |
| | | MNSLRPEDTAVYYCTIGGSLSVSSQGTLVTVSSggggsggggsggggsggggsggggsggggs |
| | | EVQLVESGGGLVQPGGSLRLSCAASGFTFSSYTLAWVRQAPGKGLEWVAAIDSS |
| | | SYTYSPDTVRGRFTISRDNAKNSLYLQMNSLRAEDTAVYYCARDSNWDALDYW |
| | | GQGTTVTVSSGGGGSGGGGSGGGGSDIQMTQSPSSLSASVGDRVTITCKASQNV |
| | | GTNVGWYQQKPGKAPKALIYSASFRYSGVPSRFSGSGSGTDFTLTISSLQPEDFA |
| | | TYYCQQYYTYPYTFGGGTKVEIKHHHHHH |
| 146 | ACP103 | mdmrvpaqllgllllwlrgarcaptssstkktqlqlehllldlqmilnginnyknpkltrmltfkfympkkatelkhlqcleee |
| | IL-2 | lkpleevlnlaqsknfhlrprdlisninvivlelkgsettfmceyadetativeflnrwitfcqsiistltSGGPGPAGMK |
| | fusion | GLPGSggggsggggsggggsggggsggggsggggsEVQLVESGGGLVQPGGSLRLSCAASGF |
| | protein | TFSSYTLAWVRQAPGKGLEWVAAIDSSSYTYSPDTVRGRFTISRDNAKNSLYLQ |
| | | MNSLRAEDTAVYYCARDSNWDALDYWGQGTTVTVSSGGGGSGGGGSGGGGS |
| | | DIQMTQSPSSLSASVGDRVTITCKASQNVGTNVGWYQQKPGKAPKALIYSASFR |
| | | YSGVPSRFSGSGSGTDFTLTISSLQPEDFATYYCQQYYTYPYTFGGGTKVEIKggg |
| | | gsggggsggggsEVQLVESGGGLVQPGNSLRLSCAASGFTFSKFGMSWVRQAPGKGL |
| | | EWVSSISGSGRDTLYAESVKGRFTISRDNAKTTLYLQMNSLRPEDTAVYYCTIGG |
| | | SLSVSSQGTLVTVSSggggsggggsggggsQVQLQESGGGLAQAGGSLSLSCAASGFTV |
| | | SNSVMAWYRQTPGKQREFVAIINSVGSTNYADSVKGRFTISRDNAKNTVYLQM |
| | | NNLKPEDTAVYVCNRNFDRIYWGQGTQVTVSSHHHHHH |
| 147 | ACP104 | mdmrvpaqllgllllwlrgarcQVQLQESGGGLAQAGGSLSLSCAASGFTVSNSVMAWYR |
| | IL-2 | QTPGKQREFVAIINSVGSTNYADSVKGRFTISRDNAKNTVYLQMNNLKPEDTAV |
| | fusion | YVCNRNFDRIYWGQGTQVTVSSaptssstkktqlqlehllldlqmilnginnyknpkltrmltfkfympkk |
| | protein | atelkhlqcleeelkpleevlnlaqsknfhlrprdlisninvivlelkgsettfmceyadetativeflnrwitfcqsiistltSGG |
| | | PGPAGMKGLPGSEVQLVESGGGLVQPGNSLRLSCAASGFTFSKFGMSWVRQAP |
| | | GKGLEWVSSISGSGRDTLYAESVKGRFTISRDNAKTTLYLQMNSLRPEDTAVYY |
| | | CTIGGSLSVSSQGTLVTVSSggggsggggsggggsggggsggggsggggsEVQLVESGGGLVQ |
| | | PGGSLRLSCAASGFTFSSYTLAWVRQAPGKGLEWVAAIDSSSYTYSPDTVRGRF |
| | | TISRDNAKNSLYLQMNSLRAEDTAVYYCARDSNWDALDYWGQGTTVTVSSGG |
| | | GGSGGGGSGGGGSDIQMTQSPSSLSASVGDRVTITCKASQNVGTNVGWYQQKP |
| | | GKAPKALIYSASFRYSGVPSRFSGSGSGTDFTLTISSLQPEDFATYYCQQYYTYPY |
| | | TFGGGTKVEIKHHHHHH |
| 148 | ACP105 | mdmrvpaqllgllllwlrgarcEVQLVESGGGLVQPGGSLRLSCAASGFTFSSYTLAWVRQ |
| | IL-2 | APGKGLEWVAAIDSSSYTYSPDTVRGRFTISRDNAKNSLYLQMNSLRAEDTAVY |
| | fusion | YCARDSNWDALDYWGQGTTVTVSSGGGGSGGGGSGGGGSDIQMTQSPSSLSAS |
| | protein | VGDRVTITCKASQNVGTNVGWYQQKPGKAPKALIYSASFRYSGVPSRFSGSGSG |
| | | TDFTLTISSLQPEDFATYYCQQYYTYPYTFGGGTKVEIKggggsggggsggggsggggsgg |
| | | ggsggggsSGGPGPAGMKGLPGSaptssstkktqlqlehllldlqmilnginnyknpkltrmltfkfympkkate |
| | | lkhlqcleeelkpleevlnlaqsknfhlrprdlisninvivlelkgsettfmceyadetativeflnrwitfcqsiistltSGGPG |
| | | PAGMKGLPGSEVQLVESGGGLVQPGNSLRLSCAASGFTFSKFGMSWVRQAPGK |
| | | GLEWVSSISGSGRDTLYAESVKGRFTISRDNAKTTLYLQMNSLRPEDTAVYYCTI |
| | | GGSLSVSSQGTLVTVSSggggsggggsggggsQVQLQESGGGLAQAGGSLSLSCAASG |
| | | FTVSNSVMAWYRQTPGKQREFVAIINSVGSTNYADSVKGRFTISRDNAKNTVYL |
| | | QMNNLKPEDTAVYVCNRNFDRIYWGQGTQVTVSSHHHHHH |
| 149 | ACP106 | mdmrvpaqllgllllwlrgarcQVQLQESGGGLAQAGGSLSLSCAASGFTVSNSVMAWYR |
| | IL-2 | QTPGKQREFVAIINSVGSTNYADSVKGRFTISRDNAKNTVYLQMNNLKPEDTAV |
| | fusion | YVCNRNFDRIYWGQGTQVTVSSggggsggggsggggsEVQLVESGGGLVQPGNSLRLS |
| | protein | CAASGFTFSKFGMSWVRQAPGKGLEWVSSISGSGRDTLYAESVKGRFTISRDNA |
| | | KTTLYLQMNSLRPEDTAVYYCTIGGSLSVSSQGTLVTVSSSGGPGPAGMKGLPG |
| | | SEVQLVESGGGLVQPGGSLRLSCAASGFTFSSYTLAWVRQAPGKGLEWVAAIDS |
| | | SSYTYSPDTVRGRFTISRDNAKNSLYLQMNSLRAEDTAVYYCARDSNWDALDY |
| | | WGQGTTVTVSSGGGGSGGGGSGGGGSDIQMTQSPSSLSASVGDRVTITCKASQN |
| | | VGTNVGWYQQKPGKAPKALIYSASFRYSGVPSRFSGSGSGTDFTLTISSLQPEDF |
| | | ATYYCQQYYTYPYTFGGGTKVEIKggggsggggsggggsggggsggggsggggsSGGPGPAG |
| | | MKGLPGSaptssstkktqlqlehllldlqmilnginnyknpkltrmltfkfympkkatelkhlqcleeelkpleevlnlaq |
| | | sknfhlrprdlisninvivlelkgsettfmceyadetativeflnrwitfcqsiistltHHHHHH |
| 150 | ACP107 | mdmrvpaqllgllllwlrgarcEVQLVESGGGLVQPGGSLRLSCAASGFTFSSYTLAWVRQ |
| | IL-2 | APGKGLEWVAAIDSSSYTYSPDTVRGRFTISRDNAKNSLYLQMNSLRAEDTAVY |
| | fusion | YCARDSNWDALDYWGQGTTVTVSSGGGGSGGGGSGGGGSDIQMTQSPSSLSAS |
| | protein | VGDRVTITCKASQNVGTNVGWYQQKPGKAPKALIYSASFRYSGVPSRFSGSGSG |
| | | TDFTLTISSLQPEDFATYYCQQYYTYPYTFGGGTKVEIKggggsggggsggggsggggsgg |
| | | ggsggggsEVQLVESGGGLVQPGNSLRLSCAASGFTFSKFGMSWVRQAPGKGLEW |
| | | VSSISGSGRDTLYAESVKGRFTISRDNAKTTLYLQMNSLRPEDTAVYYCTIGGSL |
| | | SVSSQGTLVTVSSSGGPGPAGMKGLPGSaptssstkktqlqlehllldlqmilnginnyknpkltrmltf |
| | | kfympkkatelkhlqcleeelkpleevlnlaqsknfhlrprdlisninvivlelkgsettfmceyadetativeflnrwitfcqsi |
| | | istltggggsggggsggggsQVQLQESGGGLAQAGGSLSLSCAASGFTVSNSVMAWYRQT |
| | | PGKQREFVAIINSVGSTNYADSVKGRFTISRDNAKNTVYLQMNNLKPEDTAVYV |
| | | CNRNFDRIYWGQGTQVTVSSHHHHHH |
| 151 | ACP108 | mdmrvpaqllgllllwlrgarcQVQLQESGGGLVQAGGSLRLSCAASGRIFSIDIMSWYRQA |
| | IL-2 | PGKQRELVARITRGGTISYDDSVKGRFTISRDNAKNTVYLQMNSLKPEDTGVYY |
| | fusion | CNALYGTDYWGKGTQVTVSSggggsggggsggggsaptssstkktqlqlehllldlqmilnginnyknpk |
| | protein | ltrmltfkfympkkatelkhlqcleeelkpleevlnlaqsknfhlrprdlisninvivlelkgsettfmceyadetativeflnrw |
| | | itfcqsiistltSGGPGPAGMKGLPGSrgetgpaaPGSEVQLVESGGGLVQPGNSLRLSCAAS |
| | | GFTFSKFGMSWVRQAPGKGLEWVSSISGSGRDTLYAESVKGRFTISRDNAKTTL |
| | | YLQMNSLRPEDTAVYYCTIGGSLSVSSQGTLVTVSSggggsggggsggggsggggsggggsg |
| | | gggsEVQLVESGGGLVQPGGSLRLSCAASGFTFSSYTLAWVRQAPGKGLEWVAAI |
| | | DSSSYTYSPDTVRGRFTISRDNAKNSLYLQMNSLRAEDTAVYYCARDSNWDAL |
| | | DYWGQGTTVTVSSGGGGSGGGGSGGGGSDIQMTQSPSSLSASVGDRVTITCKAS |
| | | QNVGTNVGWYQQKPGKAPKALIYSASFRYSGVPSRFSGSGSGTDFTLTISSLQPE |
| | | DFATYYCQQYYTYPYTFGGGTKVEIKHHHHHH |
| 152 | ACP117 | mdmrvpaqllgllllwlrgarcEVQLVESGGGLVQPGGSLRLSCAASGFTFSSYAMSWVRQ |
| | Anti-FN | APGKGLEWVSAISGSGGSTYYADSVKGRFTISRDNSKNTLYLQMNSLRAEDTAV |
| | CGS-2 | YYCARGVGAFRPYRKHEWGQGTLVTVSRggggsggggsggggsSSELTQDPAVSVAL |
| | scFv | GQTVRITCQGDSLRSYYASWYQQKPGQAPVLVIYGKNNRPSGIPDRFSGSSSGNT |
| | | ASLTTTGAQAEDEADYYCNSSPFEHNLVVFGGGTKLTVLHHHHHHEPEA |
| 153 | ACP118 | mdmrvpaqllgllllwlrgarcQVQLQQSGAELVRPGTSVKVSCKASGYAFTNYLIEWVKQ |
| | NARA1 | RPGQGLEWIGVINPGSGGTNYNEKFKGKATLTADKSSSTAYMQLSSLTSDDSAV |
| | Vh/V1 | YFCARWRGDGYYAYFDVWGAGTTVTVSSggggsggggsggggsDIVLTQSPASLAVS |
| | non- | LGQRATISCKASQSVDYDGDSYMNWYQQKPGQPPKLLIYAASNLESGIPARFSG |
| | cleavable | SGSGTDFTLNIHPVEEEDAATYYCQQSNEDPYTFGGGTKLEIKHHHHHHEPEA |
| 154 | ACP119 | mdmrvpaqllgllllwlrgarcQVQLQQSGAELVRPGTSVKVSCKASGYAFTNYLIEWVKQ |
| | NARA1 | RPGQGLEWIGVINPGSGGTNYNEKFKGKATLTADKSSSTAYMQLSSLTSDDSAV |
| | Vh/V1 | YFCARWRGDGYYAYFDVWGAGTTVTVSSSGGPGPAGMKGLPGSDIVLTQSPAS |
| | cleavable | LAVSLGQRATISCKASQSVDYDGDSYMNWYQQKPGQPPKLLIYAASNLESGIPA |
| | | RFSGSGSGTDFTLNIHPVEEEDAATYYCQQSNEDPYTFGGGTKLEIKHHHHHHEP |
| | | EA |
| 155 | ACP120 | mdmrvpaqllgllllwlrgarcDIVLTQSPASLAVSLGQRATISCKASQSVDYDGDSYMNW |
| | NARA1 | YQQKPGQPPKLLIYAASNLESGIPARFSGSGSGTDFTLNIHPVEEEDAATYYCQQS |
| | V1/Vh | NEDPYTFGGGTKLEIKggggsggggsggggsQVQLQQSGAELVRPGTSVKVSCKASGY |
| | non- | AFTNYLIEWVKQRPGQGLEWIGVINPGSGGTNYNEKFKGKATLTADKSSSTAYM |
| | cleavable | QLSSLTSDDSAVYFCARWRGDGYYAYFDVWGAGTTVTVSSHHHHHHEPEA |
| 156 | ACP121 | mdmrvpaqllgllllwlrgarcDIVLTQSPASLAVSLGQRATISCKASQSVDYDGDSYMNW |
| | NARA1 | YQQKPGQPPKLLIYAASNLESGIPARFSGSGSGTDFTLNIHPVEEEDAATYYCQQS |
| | V1/Vh | NEDPYTFGGGTKLEIKSGGPGPAGMKGLPGSQVQLQQSGAELVRPGTSVKVSCK |
| | cleavable | ASGYAFTNYLIEWVKQRPGQGLEWIGVINPGSGGTNYNEKFKGKATLTADKSSS |
| | | TAYMQLSSLTSDDSAVYFCARWRGDGYYAYFDVWGAGTTVTVSSHHHHHHEP |
| | | EA |
| 157 | ACP124 | mdmrvpaqllgllllwlrgarcaptssstkktqlqlehllldlqmilnginnyknpkltrmltfkfympkkatelkhlqcleee |
| | IL-2 | lkpleevlnlaqsknfhlrprdlisninvivlelkgsettfmceyadetativeflnrwitfcqsiistltggggsggggsggggs |
| | fusion | EVQLVESGGGLVQPGNSLRLSCAASGFTFSKFGMSWVRQAPGKGLEWVSSISGS |
| | protein | GRDTLYAESVKGRFTISRDNAKTTLYLQMNSLRPEDTAVYYCTIGGSLSVSSQGT |
| | | LVTVSSHHHHHHEPEA |
| 158 | ACP132 | mdmrvpaqllgllllwlrgarcaptssstkktqlqlehllldlqmilnginnyknpkltrmltfkfympkkatelkhlqcleee |
| | IL-2 | lkpleevlnlaqsknfhlrprdlisninvivlelkgsettfmceyadetativeflnrwitfcqsiistltggggsggggsggggs |
| | fusion | dahksevahrfkdlgeenfkalvliafaqylqqcpfedhvklvnevtefaktcvadesaencdkslhtlfgdklctvatlrety |
| | protein | gemadccakqepernecflqhkddnpnlprlvrpevdvmctafhdneetflkkylyeiarrhpyfyapellffakrykaaft |
| | | eccqaadkaacllpkldelrdegkassakqrlkcaslqkfgerafkawavarlsqrfpkaefaevsklvtdltkvhtecchgdl |
| | | lecaddradlakyicenqdsissklkeccekpllekshciaevendempadlpslaadfveskdvcknyaeakdvflgmfl |
| | | yeyarrhpdysvvlllrlaktyettlekccaaadphecyakvfdefkplveepqnlikqncelfeqlgeykfqnallvrytkkv |
| | | pqvstptlvevsrnlgkvgskcckhpeakrmpcaedylsvvlnqlcvlhektpvsdrvtkccteslvnrrpcfsalevdety |
| | | vpkefnaetftfhadictlsekerqikkqtalvelvkhkpkatkeqlkavmddfaafvekcckaddketcfaeegkklvaas |
| | | qaalglHHHHHHEPEA |
| 159 | ACP141 | mdmrvpaqllgllllwlrgarcaptssstkktqlqlehllldlqmilnginnyknpkltrmltfkfympkkatelkhlqcleee |
| | IL-2 | lkpleevlnlaqsknfhlrprdlisninvivlelkgsettfmceyadetativeflnrwitfcqsiistltggggsggggsggggs |
| | fusion | dahksevahrfkdlgeenfkalvliafaqylqqcpfedhvklvnevtefaktcvadesaencdkslhtlfgdklctvatlrety |
| | protein | gemadccakqepernecflqhkddnpnlprlvrpevdvmctafhdneetflkkylyeiarrhpyfyapellffakrykaaft |
| | | eccqaadkaacllpkldelrdegkassakqrlkcaslqkfgerafkawavarlsqrfpkaefaevsklvtdltkvhtecchgdl |
| | | lecaddradlakyicenqdsissklkeccekpllekshciaevendempadlpslaadfveskdvcknyaeakdvflgmfl |
| | | yeyarrhpdysvvlllrlaktyettlekccaaadphecyakvfdefkplveepqnlikqncelfeqlgeykfqnallvrytkkv |
| | | pqvstptlvevsrnlgkvgskcckhpeakrmpcaedylsvvlnqlcvlhektpvsdrvtkccteslvnrrpcfsalevdety |
| | | vpkefnaetftfhadictlsekerqikkqtalvelvkhkpkatkeqlkavmddfaafvekcckaddketcfaeegkklvaas |
| | | qaalglHHHHHHEPEA |
| 160 | ACP142 | mdmrvpaqllgllllwlrgarcaptssstkktqlqlehllldlqmilnginnyknpkltrmltfkfympkkatelkhlqcleee |
| | IL-2 | lkpleevlnlaqsknfhlrprdlisninvivlelkgsettfmceyadetativeflnrwitfcqsiistltSGGPGPAGMK |
| | fusion | GLPGSdahksevahrfkdlgeenfkalvliafaqylqqcpfedhvklvnevtefaktcvadesaencdkslhtlfgdklct |
| | protein | vatlretygemadccakqepernecflqhkddnpnlprlvrpevdvmctafhdneetflkkylyeiarrhpyfyapellffa |
| | | krykaafteccqaadkaacllpkldelrdegkassakqrlkcaslqkfgerafkawavarlsqrfpkaefaevsklvtdltkvh |
| | | tecchgdllecaddradlakyicenqdsissklkeccekpllekshciaevendempadlpslaadfveskdvcknyaeak |
| | | dvflgmflyeyarrhpdysvvlllrlaktyettlekccaaadphecyakvfdefkplveepqnlikqncelfeqlgeykfqna |
| | | llvrytkkvpqvstptlvevsrnlgkvgskcckhpeakrmpcaedylsvvlnqlcvlhektpvsdrvtkccteslvnrrpcfs |
| | | alevdetyvpkefnaetftfhadictlsekerqikkqtalvelvkhkpkatkeqlkavmddfaafvekcckaddketcfaee |
| | | gkklvaasqaalglHHHHHHEPEA |
| 161 | ACP144 | mdmrvpaqllgllllwlrgarcaptssstkktqlqlehllldlqmilnginnyknpkltrmltfkfympkkatelkhlqcleee |
| | IL-2 | lkpleevlnlaqsknfhlrprdlisninvivlelkgsettfmceyadetativeflnrwitfcqsiistltSGGPGPAGMK |
| | fusion | GLPGSEVQLVESGGGLVQPGNSLRLSCAASGFTFSKFGMSWVRQAPGKGLEWV |
| | protein | SSISGSGRDTLYAESVKGRFTISRDNAKTTLYLQMNSLRPEDTAVYYCTIGGSLS |
| | | VSSQGTLVTVSSggggsggggsggggsggggsggggsggggsSGGPGPAGMKGLPGSEVQLV |
| | | ESGGGLVQPGGSLRLSCAASGFTFSSYTLAWVRQAPGKGLEWVAAIDSSSYTYS |
| | | PDTVRGRFTISRDNAKNSLYLQMNSLRAEDTAVYYCARDSNWDALDYWGQGT |
| | | TVTVSSGGGGSGGGGSGGGGSDIQMTQSPSSLSASVGDRVTITCKASQNVGTNV |
| | | GWYQQKPGKAPKALIYSASFRYSGVPSRFSGSGSGTDFTLTISSLQPEDFATYYC |
| | | QQYYTYPYTFGGGTKVEIKggggsggggsggggsQVQLQESGGGLAQAGGSLSLSCAA |
| | | SGFTVSNSVMAWYRQTPGKQREFVAIINSVGSTNYADSVKGRFTISRDNAKNTV |
| | | YLQMNNLKPEDTAVYVCNRNFDRIYWGQGTQVTVSSHHHHHHEPEA |
| 162 | ACP145 | mdmrvpaqllgllllwlrgarcQVQLQESGGGLAQAGGSLSLSCAASGFTVSNSVMAWYR |
| | IL-2 | QTPGKQREFVAIINSVGSTNYADSVKGRFTISRDNAKNTVYLQMNNLKPEDTAV |
| | fusion | YVCNRNFDRIYWGQGTQVTVSSggggsggggsggggsaptssstkktqlqlehllldlqmilnginnykn |
| | protein | pkltrmltfkfympkkatelkhlqcleeelkpleevlnlaqsknfhlrprdlisninvivlelkgsettfmceyadetativefln |
| | | rwitfcqsiistltSGGPGPAGMKGLPGSEVQLVESGGGLVQPGNSLRLSCAASGFTFSK |
| | | FGMSWVRQAPGKGLEWVSSISGSGRDTLYAESVKGRFTISRDNAKTTLYLQMNS |
| | | LRPEDTAVYYCTIGGSLSVSSQGTLVTVSSggggsggggsggggsggggsggggsggggsSGG |
| | | PGPAGMKGLPGSEVQLVESGGGLVQPGGSLRLSCAASGFTFSSYTLAWVRQAPG |
| | | KGLEWVAAIDSSSYTYSPDTVRGRFTISRDNAKNSLYLQMNSLRAEDTAVYYCA |
| | | RDSNWDALDYWGQGTTVTVSSGGGGSGGGGSGGGGSDIQMTQSPSSLSASVGD |
| | | RVTITCKASQNVGTNVGWYQQKPGKAPKALIYSASFRYSGVPSRFSGSGSGTDF |
| | | TLTISSLQPEDFATYYCQQYYTYPYTFGGGTKVEIKHHHHHHEPEA |
| 163 | ACP146 | mdmrvpaqllgllllwlrgarcQVQLQESGGGLAQAGGSLSLSCAASGFTVSNSVMAWYR |
| | IL-2 | QTPGKQREFVAIINSVGSTNYADSVKGRFTISRDNAKNTVYLQMNNLKPEDTAV |
| | fusion | YVCNRNFDRIYWGQGTQVTVSSSGGPGPAGMKGLPGSaptssstkktqlqlehllldlqmilng |
| | protein | innyknpkltrmltfkfympkkatelkhlqcleeelkpleevlnlaqsknfhlrprdlisninvivlelkgsettfmceyadeta |
| | | tiveflnrwitfcqsiistltSGGPGPAGMKGLPGSEVQLVESGGGLVQPGNSLRLSCAASGF |
| | | TFSKFGMSWVRQAPGKGLEWVSSISGSGRDTLYAESVKGRFTISRDNAKTTLYL |
| | | QMNSLRPEDTAVYYCTIGGSLSVSSQGTLVTVSSggggsggggsggggsggggsggggsggg |
| | | gsSGGPGPAGMKGLPGSEVQLVESGGGLVQPGGSLRLSCAASGFTFSSYTLAWV |
| | | RQAPGKGLEWVAAIDSSSYTYSPDTVRGRFTISRDNAKNSLYLQMNSLRAEDTA |
| | | VYYCARDSNWDALDYWGQGTTVTVSSGGGGSGGGGSGGGGSDIQMTQSPSSL |
| | | SASVGDRVTITCKASQNVGTNVGWYQQKPGKAPKALIYSASFRYSGVPSRFSGS |
| | | GSGTDFTLTISSLQPEDFATYYCQQYYTYPYTFGGGTKVEIKHHHHHHEPEA |
| 164 | ACP133 | mdmrvpaqllgllllwlrgarcaptssstkktqlqlehllldlqmilnginnyknpkltrmltfkfympkkatelkhlqcleee |
| | IL-2- | lkpleevlnlaqsknfhlrprdlisninvivlelkgsettfmceyadetativeflnrwitfcqsiistltHHHHHH |
| | 6xHis | |
| | (“6xHis” | |
| | disclosed | |
| | as SEQ | |
| | ID NO.: | |
| | 354) | |
| 165 | ACP147 | mdmrvpaqllgllllwlrgarcaptssstkktqlqlehllldlqmilnginnyknpkltrmltfkfympkkatelkhlqcleee |
| | IL-2 | lkpleevlnlaqsknfhlrprdlisninvivlelkgsettfmceyadetativeflnrwitfcqsiistltSGGPGPAGMK |
| | fusion | GLPGSEVQLVESGGGLVQPGNSLRLSCAASGFTFSKFGMSWVRQAPGKGLEWV |
| | protein | SSISGSGRDTLYAESVKGRFTISRDNAKTTLYLQMNSLRPEDTAVYYCTIGGSLS |
| | | VSSQGTLVTVSSggggsggggsggggsggggsggggsggggsSGGPGPAGMKGLPGSEVQLV |
| | | ESGGGLVQPGGSLRLSCAASGFTFSSYTLAWVRQAPGKGLEWVAAIDSSSYTYS |
| | | PDTVRGRFTISRDNAKNSLYLQMNSLRAEDTAVYYCARDSNWDALDYWGQGT |
| | | TVTVSSGGGGSGGGGSGGGGSDIQMTQSPSSLSASVGDRVTITCKASQNVGTNV |
| | | GWYQQKPGKAPKALIYSASFRYSGVPSRFSGSGSGTDFTLTISSLQPEDFATYYC |
| | | QQYYTYPYTFGGGTKVEIKggggsggggsggggsQVQLQESGGGLVQAGGSLRLSCA |
| | | ASGRIFSIDIMSWYRQAPGKQRELVARITRGGTISYDDSVKGRFTISRDNAKNTV |
| | | YLQMNSLKPEDTGVYYCNALYGTDYWGKGTQVTVSSHHHHHHEPEA |
| 166 | ACP148 | mdmrvpaqllgllllwlrgarcQVQLQESGGGLVQAGGSLRLSCAASGRIFSIDIMSWYRQA |
| | IL-2 | PGKQRELVARITRGGTISYDDSVKGRFTISRDNAKNTVYLQMNSLKPEDTGVYY |
| | fusion | CNALYGTDYWGKGTQVTVSSggggsggggsggggsaptssstkktqlqlehllldlqmilnginnyknpk |
| | protein | ltrmltfkfympkkatelkhlqcleeelkpleevlnlaqsknfhlrprdlisninvivlelkgsettfmceyadetativeflnrw |
| | | itfcqsiistltSGGPGPAGMKGLPGSEVQLVESGGGLVQPGNSLRLSCAASGFTFSKFG |
| | | MSWVRQAPGKGLEWVSSISGSGRDTLYAESVKGRFTISRDNAKTTLYLQMNSLR |
| | | PEDTAVYYCTIGGSLSVSSQGTLVTVSSggggsggggsggggsggggsggggsggggsSGGPG |
| | | PAGMKGLPGSEVQLVESGGGLVQPGGSLRLSCAASGFTFSSYTLAWVRQAPGK |
| | | GLEWVAAIDSSSYTYSPDTVRGRFTISRDNAKNSLYLQMNSLRAEDTAVYYCAR |
| | | DSNWDALDYWGQGTTVTVSSGGGGSGGGGSGGGGSDIQMTQSPSSLSASVGDR |
| | | VTITCKASQNVGTNVGWYQQKPGKAPKALIYSASFRYSGVPSRFSGSGSGTDFT |
| | | LTISSLQPEDFATYYCQQYYTYPYTFGGGTKVEIKHHHHHHEPEA |
| 167 | ACP149 | mdmrvpaqllgllllwlrgarcQVQLQESGGGLVQAGGSLRLSCAASGRIFSIDIMSWYRQA |
| | IL-2 | PGKQRELVARITRGGTISYDDSVKGRFTISRDNAKNTVYLQMNSLKPEDTGVYY |
| | fusion | CNALYGTDYWGKGTQVTVSSSGGPGPAGMKGLPGSaptssstkktqlqlehllldlqmilngin |
| | protein | nyknpkltrmltfkfympkkatelkhlqcleeelkpleevlnlaqsknfhlrprdlisninvivlelkgsettfmceyadetati |
| | | veflnrwitfcqsiistltSGGPGPAGMKGLPGSEVQLVESGGGLVQPGNSLRLSCAASGFT |
| | | FSKFGMSWVRQAPGKGLEWVSSISGSGRDTLYAESVKGRFTISRDNAKTTLYLQ |
| | | MNSLRPEDTAVYYCTIGGSLSVSSQGTLVTVSSggggsggggsggggsggggsggggsggggs |
| | | SGGPGPAGMKGLPGSEVQLVESGGGLVQPGGSLRLSCAASGFTFSSYTLAWVRQ |
| | | APGKGLEWVAAIDSSSYTYSPDTVRGRFTISRDNAKNSLYLQMNSLRAEDTAVY |
| | | YCARDSNWDALDYWGQGTTVTVSSGGGGSGGGGSGGGGSDIQMTQSPSSLSAS |
| | | VGDRVTITCKASQNVGTNVGWYQQKPGKAPKALIYSASFRYSGVPSRFSGSGSG |
| | | TDFTLTISSLQPEDFATYYCQQYYTYPYTFGGGTKVEIKHHHHHHEPEA |
| 168 | ACP33 | mdmrvpaqllgllllwlrgarcEVQLVESGGGLVQPGNSLRLSCAASGFTFSKFGMSWVRQ |
| | Mouse | APGKGLEWVSSISGSGRDTLYAESVKGRFTISRDNAKTTLYLQMNSLRPEDTAV |
| | IFNa- | YYCTIGGSLSVSSQGTLVTVSSSGGPGPAGMKGLPGScdlpqthnlrnkraltllvqmrrlsplsc |
| | fusion | lkdrkdfgfpqekvdaqqikkapipvlseltqqilniftskdssaawnttlldsfcndlhqqlndlqgclmqqvgvqefplt |
| | protein | qedallavrkyfhritvylrekkhspcawevvraevwralsssanvSGGPGPAGMKGLPGSEVQLVESG |
| | | GGLVQPGNSLRLSCAASGFTFSKFGMSWVRQAPGKGLEWVSSISGSGRDTLYAE |
| | | SVKGRFTISRDNAKTTLYLQMNSLRPEDTAVYYCTIGGSLSVSSQGTLVTVSSHH |
| | | HHHHEPEA |
| 169 | ACP131 | mdmrvpaqllgllllwlrgarccdlpqthnlrnkraltllvqmrrlsplsclkdrkdfgfpqekvdaqqikkaqaipvlseltq |
| | Mouse | qilniftskdssaawnttlldsfcndlhqqlndlqgclmqqvgvqefpltqedallavrkyfhritvylrekkhspcawevvr |
| | IFNa | aevwralsssanvlgrlreekHHHHHHEPEA |
| 170 | ACP125 | mdmrvpaqllgllllwlrgarcEVQLVESGGGLVQPGNSLRLSCAASGFTFSKFGMSWVRQ |
| | Mouse | APGKGLEWVSSISGSGRDTLYAESVKGRFTISRDNAKTTLYLQMNSLRPEDTAV |
| | IFNa- | YYCTIGGSLSVSSQGTLVTVSSSGGPGPAGMKGLPGScdlpqthnlrnkraltllvqmrrlsplsc |
| | fusion | lkdrkdfgfpqekvdaqqikkaqaipvlseltqqilniftskdssaawnttlldsfcndlhqqlndlqgclmqqvgvqefplt |
| | protein | qedallavrkyfhritvylrekkhspcawevvraevwralsssanvlgrlreekHHHHHHEPEA |
| 171 | ACP126 | mdmrvpaqllgllllwlrgarccdlpqthnlrnkraltllvqmrrlsplsclkdrkdfgfpqekvdaqqikkaqaipvlseltq |
| | Mouse | qilniftskdssaawnttlldsfcndlhqqlndlqgclmqqvgvqefpltqedallavrkyfhritvylrekkhspcawevvr |
| | IFNa- | aevwralsssanvlgrlreekSGGPGPAGMKGLPGSEVQLVESGGGLVQPGNSLRLSCAAS |
| | fusion | GFTFSKFGMSWVRQAPGKGLEWVSSISGSGRDTLYAESVKGRFTISRDNAKTTL |
| | protein | YLQMNSLRPEDTAVYYCTIGGSLSVSSQGTLVTVSSHHHHHHEPEA |
| 172 | ACP127 | mdmrvpaqllgllllwlrgarcEAHKSEIAHRYNDLGEQHFKGLVLIAFSQYLQKCSYDEHA |
| | Mouse | KLVQEVTDFAKTCVADESAANCDKSLHTLFGDKLCAIPNLRENYGELADCCTK |
| | IFNa- | QEPERNECFLQHKDDNPSLPPFERPEAEAMCTSFKENPTTFMGHYLHEVARRHP |
| | fusion | YFYAPELLYYAEQYNEILTQCCAEADKESCLTPKLDGVKEKALVSSVRQRMKCS |
| | protein | SMQKFGERAFKAWAVARLSQTFPNADFAEITKLATDLTKVNKECCHGDLLECA |
| | | DDRAELAKYMCENQATISSKLQTCCDKPLLKKAHCLSEVEHDTMPADLPAIAAD |
| | | FVEDQEVCKNYAEAKDVFLGTFLYEYSRRHPDYSVSLLLRLAKKYEATLEKCCA |
| | | EANPPACYGTVLAEFQPLVEEPKNLVKTNCDLYEKLGEYGFQNAILVRYTQKAP |
| | | QVSTPTLVEAARNLGRVGTKCCTLPEDQRLPCVEDYLSAILNRVCLLHEKTPVSE |
| | | HVTKCCSGSLVERRPCFSALTVDETYVPKEFKAETFTFHSDICTLPEKEKQIKKQT |
| | | ALAELVKHKPKATAEQLKTVMDDFAQFLDTCCKAADKDTCFSTEGPNLVTRCK |
| | | DALASGGPGPAGMKGLPGScdlpqthnlrnkraltllvqmrrlsplsclkdrkdfgfpqekvdaqqikkaqai |
| | | pvlseltqqilniftskdssaawnttlldsfcndlhqqlndlqgclmqqvgvqefpltqedallavrkyfhritvylrekkhspc |
| | | awevvraevwralsssanvlgrlreekSGGPGPAGMKGLPGSEAHKSEIAHRYNDLGEQHFKG |
| | | LVLIAFSQYLQKCSYDEHAKLVQEVTDFAKTCVADESAANCDKSLHTLFGDKLC |
| | | AIPNLRENYGELADCCTKQEPERNECFLQHKDDNPSLPPFERPEAEAMCTSFKEN |
| | | PTTFMGHYLHEVARRHPYFYAPELLYYAEQYNEILTQCCAEADKESCLTPKLDG |
| | | VKEKALVSSVRQRMKCSSMQKFGERAFKAWAVARLSQTFPNADFAEITKLATD |
| | | LTKVNKECCHGDLLECADDRAELAKYMCENQATISSKLQTCCDKPLLKKAHCL |
| | | SEVEHDTMPADLPAIAADFVEDQEVCKNYAEAKDVFLGTFLYEYSRRHPDYSVS |
| | | LLLRLAKKYEATLEKCCAEANPPACYGTVLAEFQPLVEEPKNLVKTNCDLYEKL |
| | | GEYGFQNAILVRYTQKAPQVSTPTLVEAARNLGRVGTKCCTLPEDQRLPCVEDY |
| | | LSAILNRVCLLHEKTPVSEHVTKCCSGSLVERRPCFSALTVDETYVPKEFKAETFT |
| | | FHSDICTLPEKEKQIKKQTALAELVKHKPKATAEQLKTVMDDFAQFLDTCCKAA |
| | | DKDTCFSTEGPNLVTRCKDALAHHHHHHEPEA |
| 173 | ACP128 | mdmrvpaqllgllllwlrgarcEAHKSEIAHRYNDLGEQHFKGLVLIAFSQYLQKCSYDEHA |
| | Mouse | KLVQEVTDFAKTCVADESAANCDKSLHTLFGDKLCAIPNLRENYGELADCCTK |
| | IFNa- | QEPERNECFLQHKDDNPSLPPFERPEAEAMCTSFKENPTTFMGHYLHEVARRHP |
| | fusion | YFYAPELLYYAEQYNEILTQCCAEADKESCLTPKLDGVKEKALVSSVRQRMKCS |
| | protein | SMQKFGERAFKAWAVARLSQTFPNADFAEITKLATDLTKVNKECCHGDLLECA |
| | | DDRAELAKYMCENQATISSKLQTCCDKPLLKKAHCLSEVEHDTMPADLPAIAAD |
| | | FVEDQEVCKNYAEAKDVFLGTFLYEYSRRHPDYSVSLLLRLAKKYEATLEKCCA |
| | | EANPPACYGTVLAEFQPLVEEPKNLVKTNCDLYEKLGEYGFQNAILVRYTQKAP |
| | | QVSTPTLVEAARNLGRVGTKCCTLPEDQRLPCVEDYLSAILNRVCLLHEKTPVSE |
| | | HVTKCCSGSLVERRPCFSALTVDETYVPKEFKAETFTFHSDICTLPEKEKQIKKQT |
| | | ALAELVKHKPKATAEQLKTVMDDFAQFLDTCCKAADKDTCFSTEGPNLVTRCK |
| | | DALASGGPGPAGMKGLPGScdlpqthnlrnkraltllvqmrrlsplsclkdrkdfgfpqekvdaqqikkaqai |
| | | pvlseltqqilniftskdssaawnttlldsfcndlhqqlndlqgclmqqvgvqefpltqedallavrkyfhritvylrekkhspc |
| | | awevvraevwralsssanvlgrlreekHHHHHHEPEA |
| 174 | ACP129 | mdmrvpaqllgllllwlrgarccdlpqthnlrnkraltllvqmrrlsplsclkdrkdfgfpqekvdaqqikkaqaipvlseltq |
| | Mouse | qilniftskdssaawnttlldsfcndlhqqlndlqgclmqqvgvqefpltqedallavrkyfhritvylrekkhspcawevvr |
| | IFNa- | aevwralsssanvlgrlreekSGGPGPAGMKGLPGSEAHKSEIAHRYNDLGEQHFKGLVLI |
| | fusion | AFSQYLQKCSYDEHAKLVQEVTDFAKTCVADESAANCDKSLHTLFGDKLCAIPN |
| | protein | LRENYGELADCCTKQEPERNECFLQHKDDNPSLPPFERPEAEAMCTSFKENPTTF |
| | | MGHYLHEVARRHPYFYAPELLYYAEQYNEILTQCCAEADKESCLTPKLDGVKE |
| | | KALVSSVRQRMKCSSMQKFGERAFKAWAVARLSQTFPNADFAEITKLATDLTK |
| | | VNKECCHGDLLECADDRAELAKYMCENQATISSKLQTCCDKPLLKKAHCLSEV |
| | | EHDTMPADLPAIAADFVEDQEVCKNYAEAKDVFLGTFLYEYSRRHPDYSVSLLL |
| | | RLAKKYEATLEKCCAEANPPACYGTVLAEFQPLVEEPKNLVKTNCDLYEKLGE |
| | | YGFQNAILVRYTQKAPQVSTPTLVEAARNLGRVGTKCCTLPEDQRLPCVEDYLS |
| | | AILNRVCLLHEKTPVSEHVTKCCSGSLVERRPCFSALTVDETYVPKEFKAETFTF |
| | | HSDICTLPEKEKQIKKQTALAELVKHKPKATAEQLKTVMDDFAQFLDTCCKAAD |
| | | KDTCFSTEGPNLVTRCKDALAHHHHHHEPEA |
| 175 | ACP150 | mdmrvpaqllgllllwlrgarcQVQLQESGGGLAQAGGSLSLSCAASGFTVSNSVMAWYR |
| | Mouse | QTPGKQREFVAIINSVGSTNYADSVKGRFTISRDNAKNTVYLQMNNLKPEDTAV |
| | IFNa- | YVCNRNFDRIYWGQGTQVTVSSggggsggggsggggsEVQLVESGGGLVQPGNSLRLS |
| | fusion | CAASGFTFSKFGMSWVRQAPGKGLEWVSSISGSGRDTLYAESVKGRFTISRDNA |
| | protein | KTTLYLQMNSLRPEDTAVYYCTIGGSLSVSSQGTLVTVSSSGGPGPAGMKGLPG |
| | | Scdlpqthnlrnkraltllvqmrrlsplsclkdrkdfgfpqekvdaqqikkapipvlseltqqilniftskdssaawnttlldsf |
| | | cndlhqqlndlqgclmqqvgvqefpltqedallavrkyfhritvylrekkhspcawevvraevwralsssanvlgrlreekS |
| | | GGPGPAGMKGLPGSEVQLVESGGGLVQPGNSLRLSCAASGFTFSKFGMSWVRQ |
| | | APGKGLEWVSSISGSGRDTLYAESVKGRFTISRDNAKTTLYLQMNSLRPEDTAV |
| | | YYCTIGGSLSVSSQGTLVTVSSHHHHHHEPEA |
| 176 | ACP151 | mdmrvpaqllgllllwlrgarcEVQLVESGGGLVQPGNSLRLSCAASGFTFSKFGMSWVRQ |
| | Mouse | APGKGLEWVSSISGSGRDTLYAESVKGRFTISRDNAKTTLYLQMNSLRPEDTAV |
| | IFNa- | YYCTIGGSLSVSSQGTLVTVSSSGGPGPAGMKGLPGScdlpqthnlrnkraltllvqmrrlsplsc |
| | fusion | lkdrkdfgfpqekvdaqqikkapipvlseltqqilniftskdssaawnttlldsfcndlhqqlndlqgclmqqvgvqefplt |
| | protein | qedallavrkyfhritvylrekkhspcawevvraevwralsssanvlgrlreekSGGPGPAGMKGLPGSEVQ |
| | | LVESGGGLVQPGNSLRLSCAASGFTFSKFGMSWVRQAPGKGLEWVSSISGSGRD |
| | | TLYAESVKGRFTISRDNAKTTLYLQMNSLRPEDTAVYYCTIGGSLSVSSQGTLVT |
| | | VSSggggsggggsggggsQVQLQESGGGLAQAGGSLSLSCAASGFTVSNSVMAWYRQ |
| | | TPGKQREFVAIINSVGSTNYADSVKGRFTISRDNAKNTVYLQMNNLKPEDTAVY |
| | | VCNRNFDRIYWGQGTQVTVSSHHHHHHEPEA |
| 177 | ACP152 | mdmrvpaqllgllllwlrgarcEVQLVESGGGLVQPGNSLRLSCAASGFTFSKFGMSWVRQ |
| | Mouse | APGKGLEWVSSISGSGRDTLYAESVKGRFTISRDNAKTTLYLQMNSLRPEDTAV |
| | IFNa- | YYCTIGGSLSVSSQGTLVTVSSggggsggggsggggscdlpqthnlrnkraltllvqmrrlsplsclkdrkdf |
| | fusion | gfpqekvdaqqikkapipvlseltqqilniftskdssaawnttlldsfcndlhqqlndlqgclmqqvgvqefpltqedalla |
| | protein | vrkyfhritvylrekkhspcawevvraevwralsssanvlgrlreekggggsggggsggggsEVQLVESGGGLV |
| | | QPGNSLRLSCAASGFTFSKFGMSWVRQAPGKGLEWVSSISGSGRDTLYAESVKG |
| | | RFTISRDNAKTTLYLQMNSLRPEDTAVYYCTIGGSLSVSSQGTLVTVSSHHHHHH |
| | | EPEA |
| 178 | ACP153 | mdmrvpaqllgllllwlrgarcaptssstkktqlqlehllldlqmilnginnyknpkltrmltfkfympkkatelkhlqcleee |
| | (IL-2 | lkpleevlnlaqsknfhlrprdlisninvivlelkgsettfmceyadetativeflnrwitfcqsiistltsggpGPAGLYAQ |
| | Conju- | pgsEVQLVESGGGLVQPGNSLRLSCAASGFTFSKFGMSWVRQAPGKGLEWVSSIS |
| | gate) | GSGRDTLYAESVKGRFTISRDNAKTTLYLQMNSLRPEDTAVYYCTIGGSLSVSSQ |
| | | GTLVTVSSggggsggggsggggsggggsggggsggggssggpGPAGLYAQpgsEVQLVESGGGL |
| | | VQPGGSLRLSCAASGFTFSSYTLAWVRQAPGKGLEWVAAIDSSSYTYSPDTVRG |
| | | RFTISRDNAKNSLYLQMNSLRAEDTAVYYCARDSNWDALDYWGQGTTVTVSS |
| | | GGGGSGGGGSGGGGSDIQMTQSPSSLSASVGDRVTITCKASQNVGTNVGWYQQ |
| | | KPGKAPKALIYSASFRYSGVPSRFSGSGSGTDFTLTISSLQPEDFATYYCQQYYTY |
| | | PYTFGGGTKVEIKHHHHHHEPEA |
| 179 | ACP154 | mdmrvpaqllgllllwlrgarcaptssstkktqlqlehllldlqmilnginnyknpkltrmltfkfympkkatelkhlqcleee |
| | (IL-2 | lkpleevlnlaqsknfhlrprdlisninvivlelkgsettfmceyadetativeflnrwitfcqsiistltsggpPGGPAGIGp |
| | Conju- | gsEVQLVESGGGLVQPGNSLRLSCAASGFTFSKFGMSWVRQAPGKGLEWVSSIS |
| | gate) | GSGRDTLYAESVKGRFTISRDNAKTTLYLQMNSLRPEDTAVYYCTIGGSLSVSSQ |
| | | GTLVTVSSggggsggggsggggsggggsggggsggggssggpPGGPAGIGpgsEVQLVESGGGLV |
| | | QPGGSLRLSCAASGFTFSSYTLAWVRQAPGKGLEWVAAIDSSSYTYSPDTVRGR |
| | | FTISRDNAKNSLYLQMNSLRAEDTAVYYCARDSNWDALDYWGQGTTVTVSSG |
| | | GGGSGGGGSGGGGSDIQMTQSPSSLSASVGDRVTITCKASQNVGTNVGWYQQK |
| | | PGKAPKALIYSASFRYSGVPSRFSGSGSGTDFTLTISSLQPEDFATYYCQQYYTYP |
| | | YTFGGGTKVEIKHHHHHHEPEA |
| 180 | ACP155 | mdmrvpaqllgllllwlrgarcaptssstkktqlqlehllldlqmilnginnyknpkltrmltfkfympkkatelkhlqcleee |
| | (IL-2 | lkpleevlnlaqsknfhlrprdlisninvivlelkgsettfmceyadetativeflnrwitfcqsiistltsggpALFKSSFPp |
| | Conju- | gsEVQLVESGGGLVQPGNSLRLSCAASGFTFSKFGMSWVRQAPGKGLEWVSSIS |
| | gate) | GSGRDTLYAESVKGRFTISRDNAKTTLYLQMNSLRPEDTAVYYCTIGGSLSVSSQ |
| | | GTLVTVSSggggsggggsggggsggggsggggsggggssggpALFKSSFPpgsEVQLVESGGGLV |
| | | QPGGSLRLSCAASGFTFSSYTLAWVRQAPGKGLEWVAAIDSSSYTYSPDTVRGR |
| | | FTISRDNAKNSLYLQMNSLRAEDTAVYYCARDSNWDALDYWGQGTTVTVSSG |
| | | GGGSGGGGSGGGGSDIQMTQSPSSLSASVGDRVTITCKASQNVGTNVGWYQQK |
| | | PGKAPKALIYSASFRYSGVPSRFSGSGSGTDFTLTISSLQPEDFATYYCQQYYTYP |
| | | YTFGGGTKVEIKHHHHHHEPEA |
| 181 | ACP156 | mdmrvpaqllgllllwlrgarcaptssstkktqlqlehllldlqmilnginnyknpkltrmltfkfympkkatelkhlqcleee |
| | (IL-2 | lkpleevlnlaqsknfhlrprdlisninvivlelkgsettfmceyadetativeflnrwitfcqsiistltsggpPLAQKLKS |
| | Conju- | SpgsEVQLVESGGGLVQPGNSLRLSCAASGFTFSKFGMSWVRQAPGKGLEWVSSI |
| | gate) | SGSGRDTLYAESVKGRFTISRDNAKTTLYLQMNSLRPEDTAVYYCTIGGSLSVSS |
| | | QGTLVTVSSggggsggggsggggsggggsggggsggggssggpPLAQKLKSSpgsEVQLVESGG |
| | | GLVQPGGSLRLSCAASGFTFSSYTLAWVRQAPGKGLEWVAAIDSSSYTYSPDTV |
| | | RGRFTISRDNAKNSLYLQMNSLRAEDTAVYYCARDSNWDALDYWGQGTTVTV |
| | | SSGGGGSGGGGSGGGGSDIQMTQSPSSLSASVGDRVTITCKASQNVGTNVGWY |
| | | QQKPGKAPKALIYSASFRYSGVPSRFSGSGSGTDFTLTISSLQPEDFATYYCQQYY |
| | | TYPYTFGGGTKVEIKHHHHHHEPEA |
| 182 | ACP157 | mdmrvpaqllgllllwlrgarcaptssstkktqlqlehllldlqmilnginnyknpkltrmltfkfympkkatelkhlqcleee |
| | (IL-2 | lkpleevlnlaqsknfhlrprdlisninvivlelkgsettfmceyadetativeflnrwitfcqsiistltsggpPGGPAGIGa |
| | Conju- | lfkssfpPLAQKLKSSpgsEVQLVESGGGLVQPGNSLRLSCAASGFTFSKFGMSWVR |
| | gate) | QAPGKGLEWVSSISGSGRDTLYAESVKGRFTISRDNAKTTLYLQMNSLRPEDTA |
| | | VYYCTIGGSLSVSSQGTLVTVSSggggsggggsggggsggggsggggsggggssggpPGGPAGI |
| | | GalfkssfpPLAQKLKSSpgsEVQLVESGGGLVQPGGSLRLSCAASGFTFSSYTLAWV |
| | | RQAPGKGLEWVAAIDSSSYTYSPDTVRGRFTISRDNAKNSLYLQMNSLRAEDTA |
| | | VYYCARDSNWDALDYWGQGTTVTVSSGGGGSGGGGSGGGGSDIQMTQSPSSL |
| | | SASVGDRVTITCKASQNVGTNVGWYQQKPGKAPKALIYSASFRYSGVPSRFSGS |
| | | GSGTDFTLTISSLQPEDFATYYCQQYYTYPYTFGGGTKVEIKHHHHHHEPEA |
| 183 | | Place Hold |
| 184 | | Place Hold |
| 185 | | Place Hold |
| 186 | | Place Hold |
| 187 | | Place Hold |
| 188 | | Place Hold |
| 189 | | Place Hold |
| 190 | | Place Hold |
| 191 | Blocker 2 | mdmrvpaqllgllllwlrgarcEVQLVESGGGLVQPGGSLRLSCAASGFTFSSYTLAWVRQ |
| | (IL2 | APGKGLEWVAAIDSSSYTYSPDTVRGRFTISRDNAKNSLYLQMNSLRAEDTAVY |
| | blocker) | YCARDSNWDALDYWGQGTTVTVSSggggsggggsggggsDIQMTQSPSSLSASVGDR |
| | | VTITCKASQNVGTNVGWYQQKPGKAPKALIYSASFRYSGVPSRFSGSGSGTDFT |
| | | LTISSLQPEDFATYYCQQYYTYPYTFGGGTKVEIKHHHHHH |
| 192 | Blocker | mdmrvpaqllgllllwlrgarcQSVLTQPPSVSGAPGQRVTISCSGSRSNIGSNTVKWYQQL |
| | 12 (IL-12 | PGTAPKWYYNDQRPSGVPDRFSGSKSGTSASLAITGLQAEDEADYYCQSYDRY |
| | blocker) | THPALLFGTGTKVTVLggggsggggsggggsQVQLVESGGGVVQPGRSLRLSCAASGF |
| | | TFSSYGMHWVRQAPGKGLEWVAFIRYDGSNKYYADSVKGRFTISRDNSKNTLY |
| | | LQMNSLRAEDTAVYYCKTHGSHDNWGQGTMVTVSSHHHHHH |
| 193 | Human_I | cdlpqthslgsrrtlmllaqmrrislfsclkdrhdfgfpqeefgnqfqkaetipvlhemiqqifnlfstkdssaawdetlldkfy |
| | FNA2b | telyqqlndleacviqgvgvtetplmkedsilavrkyfqritlylkekkyspcawevvraeimrsfslstnlqeslrskeHHH |
| | | HHH** |
| 194 | ACP239 | iwelkkdvyvveldwypdapgemvvltcdtpeedgitwtldqssevlgsgktltiqvkefgdagqytchkggevlshsllll |
| | -geneart | hkkedgiwstdilkdqkepknktflrceaknysgrftcwwlttistdltfsvkssrgssdpqgvtcgaatlsaervrgdnkey |
| | | eysvecqedsacpaaeeslpievmvdavhklkyenytssffirdiikpdppknlqlkplknsrqvevsweypdtwstphs |
| | | yfsltfcvqvqgkskrekkdrvftdktsatvicrknasisvraqdryyssswsewasvpcsggggsggggsggggsrvipvsg |
| | | parclsqsrnllkttddmvktareklkhysctaedidheditrdqtstlktclplelhknesclatretssttrgsclppqktslm |
| | | mtlclgsiyedlkmyqtefqainaalqnhnhqqiildkgmlvaidelmqslnhngetlrqkppvgeadpyrvkmklcillh |
| | | afstrvvtinrvmgylssahhhhhh |
| 195 | 3CYT5_s | QVQLQESGGGLVQAGGSLRLSCAASGRTFSSVYDMGWFRQAPGKDREFVARITESARNTRYADSV |
| | dAb | RGRFTISRDNAKNTVYLQMNNLELEDAAVYYCAADPQTVVVGTPDYWGQGTQVTVSSAAAYPYD |
| | | VPDYGSHHHHHH |
| 196 | ACP248 | QSVLTQPPSVSGAPGQRVTISCtGSsSNIGSNTVKWYQQLPGTAPKLLIYgN |
| | | DQRPSGVPDRFSGSKSGTSASLAITGLQAEDEADYYCQSYDRYTHPAyvF |
| | | GTGTKVTVLggggsggggsggggsQVQLVESGGGVVQPGRSLRLSCAASGFTFS |
| | | SYGMHWVRQAPGKGLEWVAFIRYDGSNKYYADSVKGRFTISRDNSKNT |
| | | LYLQMNSLRAEDTAVYYCKTHGSHDNWGQGTMVTVSSHHHHHHR |
| 197 | ACP249 | QSVLTQPPSVSGAPGQRVTISCtGSsSNIGSNTVKWYQQLPGTAPKLLIYYNDQRP |
| | | SGVPDRFSGSKSGTSASLAITGLQAEDEADYYCQSYDRYTHPAyvFGTGTKVTVL |
| | | ggggsggggsggggsQVQLVESGGGVVQPGRSLRLSCAASGFTFSSYGMHWVRQAPG |
| | | KGLEWVAFIRYDGSNKYYADSVKGRFTISRDNSKNTLYLQMNSLRAEDTAVYY |
| | | CKTHGSHDNWGQGTMVTVSSHHHHHH |
| 198 | ACP250 | QSVLTQPPSVSGAPGQRVTISCSGSRSNIGSNTVKWYQQLPGTAPKLLIYYNDQR |
| | | PSGVPDRFSGSKSGTSASLAITGLQAEDEADYYCQSYDRYTHPALLFGTGTKVT |
| | | VLggggsggggsggggsQVQLVESGGGVVQPGRSLRLSCAASGFTFSSYaMHWVRQAP |
| | | GKGLEWVAvIsYDGSNKYYADSVKGRFTISRDNSKNTLYLQMNSLRAEDTAVY |
| | | YCarHGSHDNWGQGTMVTVSSHHHHHH |
| 199 | ACP251 | QSVLTQPPSVSGAPGQRVTISCSGSRSNIGSNTVKWYQQLPGTAPKLLIYYNDQR |
| | | PSGVPDRFSGSKSGTSASLAITGLQAEDEADYYCQSYDRYTHPALLFGTGTKVT |
| | | VLggggsggggsggggsQVQLVESGGGVVQPGRSLRLSCAASGFTFSSYGMHWVRQA |
| | | PGKGLEWVAFIRYeGSNKYYADSVKGRFTISRDNSKNTLYLQMNSLRAEDTAVY |
| | | YCKTHGSHDNWGQGTMVTVSSHHHHHH |
| 200 | ACP252 | QSVLTQPPSVSGAPGQRVTISCSGSRSNIGSNTVKWYQQLPGTAPKLLIYYNDQR |
| | | PSGVPDRFSGSKSGTSASLAITGLQAEDEADYYCQSYDRYTHPALLFGTGTKVT |
| | | VLggggsggggsggggsQVQLVESGGGVVQPGRSLRLSCAASGFTFSSYGMHWVRQA |
| | | PGKGLEWVAFIRYDGSNKYYAeSVKGRFTISRDNSKNTLYLQMNSLRAEDTAVY |
| | | YCKTHGSHDNWGQGTMVTVSSHHHHHH |
| 201 | ACP253 | QSVLTQPPSVSGAPGQRVTISCSGSRSNIGSqTVKWYQQLPGTAPKLLIYYNDQR |
| | | PSGVPDRFSGSKSGTSASLAITGLQAEDEADYYCQSYeRYTHPALLFGTGTKVTV |
| | | LggggsggggsggggsQVQLVESGGGVVQPGRSLRLSCAASGFTFSSYGMHWVRQAP |
| | | GKGLEWVAFIRYDGSNKYYADSVKGRFTISRDNSKNTLYLQMNSLRAEDTAVY |
| | | YCKTHGSHDNWGQGTMVTVSSHHHHHH |
| 202 | ACP254 | QSVLTQPPSVSGAPGQRVTISCSGSRSNIGSqTVKWYQQLPGTAPKLLIYYNDQR |
| | | PSGVPDRFSGSKSGTSASLAITGLQAEDEADYYCQSYsRYTHPALLFGTGTKVTV |
| | | LggggsggggsggggsQVQLVESGGGVVQPGRSLRLSCAASGFTFSSYGMHWVRQAP |
| | | GKGLEWVAFIRYDGSNKYYADSVKGRFTISRDNSKNTLYLQMNSLRAEDTAVY |
| | | YCKTHGSHDNWGQGTMVTVSSHHHHHH |
| 203 | ACP255 | QSVLTQPPSVSGAPGQRVTISCSGSeSNIGSNTVKWYQQLPGTAPKLLIYYNDQR |
| | | PSGVPDRFSGSKSGTSASLAITGLQAEDEADYYCQSYDRYTHPALLFGTGTKVT |
| | | VLggggsggggsggggsQVQLVESGGGVVQPGRSLRLSCAASGFTFSSYGMHWVRQA |
| | | PGKGLEWVAFIRYDGSNKYYADSVKGRFTISRDNSKNTLYLQMNSLRAEDTAV |
| | | YYCKTHGSHDNWGQGTMVTVSSHHHHHH |
| 204 | ACP256 | QSVLTQPPSVSGAPGQRVTISCSGSsSNIGSNTVKWYQQLPGTAPKLLIYYNDQRP |
| | | SGVPDRFSGSKSGTSASLAITGLQAEDEADYYCQSYDRYTHPALLFGTGTKVTV |
| | | LggggsggggsggggsQVQLVESGGGVVQPGRSLRLSCAASGFTFSSYGMHWVRQAP |
| | | GKGLEWVAFIRYDGSNKYYADSVKGRFTISRDNSKNTLYLQMNSLRAEDTAVY |
| | | YCKTHGSHDNWGQGTMVTVSSHHHHHH |
| 205 | ACP257 | QSVLTQPPSVSGAPGQRVTISCSGSRSNIGdNTVKWYQQLPGTAPKLLIYYNDQR |
| | | PSGVPDRFSGSKSGTSASLAITGLQAEDEADYYCQSYDRYTHPALLFGTGTKVT |
| | | VLggggsggggsggggsQVQLVESGGGVVQPGRSLRLSCAASGFTFSSYGMHWVRQA |
| | | PGKGLEWVAFIRYDGSNKYYADSVKGRFTISRDNSKNTLYLQMNSLRAEDTAV |
| | | YYCKTHGSHDNWGQGTMVTVSSHHHHHH |
| 206 | ACP258 | QSVLTQPPSVSGAPGQRVTISCSGSRSNIGeNTVKWYQQLPGTAPKLLIYYNDQR |
| | | PSGVPDRFSGSKSGTSASLAITGLQAEDEADYYCQSYDRYTHPALLFGTGTKVT |
| | | VLggggsggggsggggsQVQLVESGGGVVQPGRSLRLSCAASGFTFSSYGMHWVRQA |
| | | PGKGLEWVAFIRYDGSNKYYADSVKGRFTISRDNSKNTLYLQMNSLRAEDTAV |
| | | YYCKTHGSHDNWGQGTMVTVSSHHHHHH |
| 207 | ACP259 | QSVLTQPPSVSGAPGQRVTISCSGSRSNIGSdTVKWYQQLPGTAPKLLIYYNDQR |
| | | PSGVPDRFSGSKSGTSASLAITGLQAEDEADYYCQSYDRYTHPALLFGTGTKVT |
| | | VLggggsggggsggggsQVQLVESGGGVVQPGRSLRLSCAASGFTFSSYGMHWVRQA |
| | | PGKGLEWVAFIRYDGSNKYYADSVKGRFTISRDNSKNTLYLQMNSLRAEDTAV |
| | | YYCKTHGSHDNWGQGTMVTVSSHHHHHH |
| 208 | ACP260 | QSVLTQPPSVSGAPGQRVTISCSGSRSNIGSeTVKWYQQLPGTAPKLLIYYNDQRP |
| | | SGVPDRFSGSKSGTSASLAITGLQAEDEADYYCQSYDRYTHPALLFGTGTKVTV |
| | | LggggsggggsggggsQVQLVESGGGVVQPGRSLRLSCAASGFTFSSYGMHWVRQAP |
| | | GKGLEWVAFIRYDGSNKYYADSVKGRFTISRDNSKNTLYLQMNSLRAEDTAVY |
| | | YCKTHGSHDNWGQGTMVTVSSHHHHHH |
| 209 | ACP261 | QSVLTQPPSVSGAPGQRVTISCSGSRSNIGSNdVKWYQQLPGTAPKLLIYYNDQR |
| | | PSGVPDRFSGSKSGTSASLAITGLQAEDEADYYCQSYDRYTHPALLFGTGTKVT |
| | | VLggggsggggsggggsQVQLVESGGGVVQPGRSLRLSCAASGFTFSSYGMHWVRQA |
| | | PGKGLEWVAFIRYDGSNKYYADSVKGRFTISRDNSKNTLYLQMNSLRAEDTAV |
| | | YYCKTHGSHDNWGQGTMVTVSSHHHHHH |
| 210 | ACP262 | QSVLTQPPSVSGAPGQRVTISCSGSRSNIGSNTVdWYQQLPGTAPKLLIYYNDQR |
| | | PSGVPDRFSGSKSGTSASLAITGLQAEDEADYYCQSYDRYTHPALLFGTGTKVT |
| | | VLggggsggggsggggsQVQLVESGGGVVQPGRSLRLSCAASGFTFSSYGMHWVRQA |
| | | PGKGLEWVAFIRYDGSNKYYADSVKGRFTISRDNSKNTLYLQMNSLRAEDTAV |
| | | YYCKTHGSHDNWGQGTMVTVSSHHHHHH |
| 211 | ACP263 | QSVLTQPPSVSGAPGQRVTISCSGSRSNIGSNTVeWYQQLPGTAPKLLIYYNDQRP |
| | | SGVPDRFSGSKSGTSASLAITGLQAEDEADYYCQSYDRYTHPALLFGTGTKVTV |
| | | LggggsggggsggggsQVQLVESGGGVVQPGRSLRLSCAASGFTFSSYGMHWVRQAP |
| | | GKGLEWVAFIRYDGSNKYYADSVKGRFTISRDNSKNTLYLQMNSLRAEDTAVY |
| | | YCKTHGSHDNWGQGTMVTVSSHHHHHH |
| 212 | ACP264 | QSVLTQPPSVSGAPGQRVTISCSGSRSNIGSNTVKWYQQLPGTAPKLLIYYNDQd |
| | | PSGVPDRFSGSKSGTSASLAITGLQAEDEADYYCQSYDRYTHPALLFGTGTKVT |
| | | VLggggsggggsggggsQVQLVESGGGVVQPGRSLRLSCAASGFTFSSYGMHWVRQA |
| | | PGKGLEWVAFIRYDGSNKYYADSVKGRFTISRDNSKNTLYLQMNSLRAEDTAV |
| | | YYCKTHGSHDNWGQGTMVTVSSHHHHHH |
| 213 | ACP265 | QSVLTQPPSVSGAPGQRVTISCSGSRSNIGSNTVKWYQQLPGTAPKLLIYYNDQe |
| | | PSGVPDRFSGSKSGTSASLAITGLQAEDEADYYCQSYDRYTHPALLFGTGTKVT |
| | | VLggggsggggsggggsQVQLVESGGGVVQPGRSLRLSCAASGFTFSSYGMHWVRQA |
| | | PGKGLEWVAFIRYDGSNKYYADSVKGRFTISRDNSKNTLYLQMNSLRAEDTAV |
| | | YYCKTHGSHDNWGQGTMVTVSSHHHHHH |
| 214 | ACP266 | QSVLTQPPSVSGAPGQRVTISCSGSRSNIGSNTVKWYQQLPGTAPKLLIYYNDQR |
| | | PdGVPDRFSGSKSGTSASLAITGLQAEDEADYYCQSYDRYTHPALLFGTGTKVTV |
| | | LggggsggggsggggsQVQLVESGGGVVQPGRSLRLSCAASGFTFSSYGMHWVRQAP |
| | | GKGLEWVAFIRYDGSNKYYADSVKGRFTISRDNSKNTLYLQMNSLRAEDTAVY |
| | | YCKTHGSHDNWGQGTMVTVSSHHHHHH |
| 215 | ACP267 | QSVLTQPPSVSGAPGQRVTISCSGSRSNIGSNTVKWYQQLPGTAPKLLIYYNDQR |
| | | PSGVPDRFSGSKSGTSASLAITGLQAEDEADYYCQSYDeYTHPALLFGTGTKVTV |
| | | LggggsggggsggggsQVQLVESGGGVVQPGRSLRLSCAASGFTFSSYGMHWVRQAP |
| | | GKGLEWVAFIRYDGSNKYYADSVKGRFTISRDNSKNTLYLQMNSLRAEDTAVY |
| | | YCKTHGSHDNWGQGTMVTVSSHHHHHH |
| 216 | ACP268 | QSVLTQPPSVSGAPGQRVTISCSGSRSNIGSNTVKWYQQLPGTAPKLLIYYNDQR |
| | | PSGVPDRFSGSKSGTSASLAITGLQAEDEADYYCQSYDRYTdPALLFGTGTKVTV |
| | | LggggsggggsggggsQVQLVESGGGVVQPGRSLRLSCAASGFTFSSYGMHWVRQAP |
| | | GKGLEWVAFIRYDGSNKYYADSVKGRFTISRDNSKNTLYLQMNSLRAEDTAVY |
| | | YCKTHGSHDNWGQGTMVTVSSHHHHHH |
| 217 | ACP269 | QSVLTQPPSVSGAPGQRVTISCSGSeSNIGSNTVKWYQQLPGTAPKLLIYYNDQeP |
| | | SGVPDRFSGSKSGTSASLAITGLQAEDEADYYCQSYDeYTHPALLFGTGTKVTVL |
| | | ggggsggggsggggsQVQLVESGGGVVQPGRSLRLSCAASGFTFSSYGMHWVRQAPG |
| | | KGLEWVAFIRYDGSNKYYADSVKGRFTISRDNSKNTLYLQMNSLRAEDTAVYY |
| | | CKTHGSHDNWGQGTMVTVSSHHHHHH |
| 218 | ACP270 | QSVLTQPPSVSGAPGQRVTISCSGSeSNIGSNdVKWYQQLPGTAPKLLIYYNDQRP |
| | | SGVPDRFSGSKSGTSASLAITGLQAEDEADYYCQSYDRYTHPALLFGTGTKVTV |
| | | LggggsggggsggggsQVQLVESGGGVVQPGRSLRLSCAASGFTFSSYGMHWVRQAP |
| | | GKGLEWVAFIRYDGSNKYYADSVKGRFTISRDNSKNTLYLQMNSLRAEDTAVY |
| | | YCKTHGSHDNWGQGTMVTVSSHHHHHH |
| 219 | ACP271 | QSVLTQPPSVSGAPGQRVTISCSGSRSNIGSNTVKWYQQLPGTAPKLLIYYNDQR |
| | | PSGVPDRFSGSKSGTSASLAITGLQAEDEADYYCQSYDRYTHPALLFGTGTKVT |
| | | VLggggsggggsggggsQVQLVESGGGVVQPGRSLRLSCAASGFTFeSYGMHWVRQA |
| | | PGKGLEWVAFIRYDGSNKYYADSVKGRFTISRDNSKNTLYLQMNSLRAEDTAV |
| | | YYCKTHGSHDNWGQGTMVTVSSHHHHHH |
| 220 | ACP272 | QSVLTQPPSVSGAPGQRVTISCSGSRSNIGSNTVKWYQQLPGTAPKLLIYYNDQR |
| | | PSGVPDRFSGSKSGTSASLAITGLQAEDEADYYCQSYDRYTHPALLFGTGTKVT |
| | | VLggggsggggsggggsQVQLVESGGGVVQPGRSLRLSCAASGFTFSeYGMHWVRQA |
| | | PGKGLEWVAFIRYDGSNKYYADSVKGRFTISRDNSKNTLYLQMNSLRAEDTAV |
| | | YYCKTHGSHDNWGQGTMVTVSSHHHHHH |
| 221 | ACP273 | QSVLTQPPSVSGAPGQRVTISCSGSRSNIGSNTVKWYQQLPGTAPKLLIYYNDQR |
| | | PSGVPDRFSGSKSGTSASLAITGLQAEDEADYYCQSYDRYTHPALLFGTGTKVT |
| | | VLggggsggggsggggsQVQLVESGGGVVQPGRSLRLSCAASGFTFSdYGMHWVRQA |
| | | PGKGLEWVAFIRYDGSNKYYADSVKGRFTISRDNSKNTLYLQMNSLRAEDTAV |
| | | YYCKTHGSHDNWGQGTMVTVSSHHHHHH |
| 222 | ACP274 | QSVLTQPPSVSGAPGQRVTISCSGSRSNIGSNTVKWYQQLPGTAPKLLIYYNDQR |
| | | PSGVPDRFSGSKSGTSASLAITGLQAEDEADYYCQSYDRYTHPALLFGTGTKVT |
| | | VLggggsggggsggggsQVQLVESGGGVVQPGRSLRLSCAASGFTFSSYGMHWVRQA |
| | | PGKGLEWVAFIeYDGSNKYYADSVKGRFTISRDNSKNTLYLQMNSLRAEDTAVY |
| | | YCKTHGSHDNWGQGTMVTVSSHHHHHH |
| 223 | ACP275 | QSVLTQPPSVSGAPGQRVTISCSGSRSNIGSNTVKWYQQLPGTAPKLLIYYNDQR |
| | | PSGVPDRFSGSKSGTSASLAITGLQAEDEADYYCQSYDRYTHPALLFGTGTKVT |
| | | VLggggsggggsggggsQVQLVESGGGVVQPGRSLRLSCAASGFTFSSYGMHWVRQA |
| | | PGKGLEWVAFIdYDGSNKYYADSVKGRFTISRDNSKNTLYLQMNSLRAEDTAV |
| | | YYCKTHGSHDNWGQGTMVTVSSHHHHHH |
| 224 | ACP276 | QSVLTQPPSVSGAPGQRVTISCSGSRSNIGSNTVKWYQQLPGTAPKLLIYYNDQR |
| | | PSGVPDRFSGSKSGTSASLAITGLQAEDEADYYCQSYDRYTHPALLFGTGTKVT |
| | | VLggggsggggsggggsQVQLVESGGGVVQPGRSLRLSCAASGFTFSSYGMHWVRQA |
| | | PGKGLEWVAFIRYDGSNdYYADSVKGRFTISRDNSKNTLYLQMNSLRAEDTAVY |
| | | YCKTHGSHDNWGQGTMVTVSSHHHHHH |
| 225 | ACP277 | QSVLTQPPSVSGAPGQRVTISCSGSRSNIGSNTVKWYQQLPGTAPKLLIYYNDQR |
| | | PSGVPDRFSGSKSGTSASLAITGLQAEDEADYYCQSYDRYTHPALLFGTGTKVT |
| | | VLggggsggggsggggsQVQLVESGGGVVQPGRSLRLSCAASGFTFSSYGMHWVRQA |
| | | PGKGLEWVAFIRYDGSNeYYADSVKGRFTISRDNSKNTLYLQMNSLRAEDTAVY |
| | | YCKTHGSHDNWGQGTMVTVSSHEIHHHH |
| 226 | ACP278 | QSVLTQPPSVSGAPGQRVTISCSGSRSNIGSNTVKWYQQLPGTAPKLLIYYNDQR |
| | | PSGVPDRFSGSKSGTSASLAITGLQAEDEADYYCQSYDRYTHPALLFGTGTKVT |
| | | VLggggsggggsggggsQVQLVESGGGVVQPGRSLRLSCAASGFTFSSYGMHWVRQA |
| | | PGKGLEWVAFIRYDGSNKYYADSVeGRFTISRDNSKNTLYLQMNSLRAEDTAVY |
| | | YCKTHGSHDNWGQGTMVTVSSHHHHHH |
| 227 | ACP279 | QSVLTQPPSVSGAPGQRVTISCSGSRSNIGSNTVKWYQQLPGTAPKLLIYYNDQR |
| | | PSGVPDRFSGSKSGTSASLAITGLQAEDEADYYCQSYDRYTHPALLFGTGTKVT |
| | | VLggggsggggsggggsQVQLVESGGGVVQPGRSLRLSCAASGFTFSSYGMHWVRQA |
| | | PGKGLEWVAFIRYDGSNKYYADSVKGRFTISRDNSKNTLYLQMNSLRAEDTAV |
| | | YYCKTHGSeDNWGQGTMVTVSSHHHHHH |
| 228 | ACP280 | QSVLTQPPSVSGAPGQRVTISCSGSRSNIGSNTVKWYQQLPGTAPKLLIYYNDQR |
| | | PSGVPDRFSGSKSGTSASLAITGLQAEDEADYYCQSYDRYTHPALLFGTGTKVT |
| | | VLggggsggggsggggsQVQLVESGGGVVQPGRSLRLSCAASGFTFSSYGMHWVRQA |
| | | PGKGLEWVAFIeYDGSNKYYADSVeGRFTISRDNSKNTLYLQMNSLRAEDTAVY |
| | | YCKTHGSHDNWGQGTMVTVSSHHHHHH |
| 229 | ACP281 | QSVLTQPPSVSGAPGQRVTISCSGSRSNIGSNTVKWYQQLPGTAPKLLIYYNDQR |
| | | PSGVPDRFSGSKSGTSASLAITGLQAEDEADYYCQSYDRYTHPALLFGTGTKVT |
| | | VLggggsggggsggggsQVQLVESGGGVVQPGRSLRLSCAASGFTFSSYGMHWVRQA |
| | | PGKGLEWVAFIeYDGSNKYYADSVeGRFTISRDNSKNTLYLQMNSLRAEDTAVY |
| | | YCKTHGSeDNWGQGTMVTVSSHHHHHH |
| 230 | ACP282 | QSVLTQPPSVSGAPGQRVTISCSGSRSNIGSNTVKWYQQLPGTAPKLLIYYNDQR |
| | | PSGVPDRFSGSKSGTSASLAITGLQAEDEADYYCQSYDRYTHPALLFGTGTKVT |
| | | VLggggsggggsggggsQVQLVESGGGVVQPGRSLRLSCAASGFTFSSYGMHWVRQA |
| | | PGKGLEWVAFIRYDGSNKYYADSVKGRFTISRDNSKNTLYLQMNSLRAEDTAV |
| | | YYCKTHGSHDNWGQGTMVTVSSHEIREIHH |
| 231 | ACP283 | iwelkkdvyvveldwypdapgemvvltcdtpeedgitwtldqssevlgsgtltiqvkefgdagqytchkggevlshslll |
| | | lhkkedgiwstdilkdqkepknktflrceaknysgrftcwwlttistdltfsvkssrgssdpqgvtcgaatlsaervrgdnkey |
| | | eysvecqedsacpaaeeslpievmvdavhklkyenytssffirdiikpdppknlqlkplknsrqvevsweypdtwstphs |
| | | yfsltfcvqvqgkskrekkdrvftdktsatvicrknasisvraqdryyssswsewasvpcs |
| 232 | 3TOW6 | QVQLQESGGGLVQTGGSLRLSCTTSGTIFSGYTMGWYRQAPGEQRELVA |
| | 9sdAb | VISGGGDTNYADSVKGRFTISRDNTKDTMYLQMNSLKPEDTAVYYCYSR |
| | | EVTPPWKLYWGQGTQVTVSSAAAYPYDVPDYGSHHHHHH |
| 233 | 3TOW85 | QVQLQESGGGLVQEGGSLRLSCAASERIFSTDVMGWYRQAAEKQRELVAVVSA |
| | sdAb | RGTTNYLDAVKGRFTISRDNARNTLTLQMNDLKPEDTASYYCYVRETTSPWRIY |
| | | WGQGTQVTVSSAAAYPYDVPDYGSHHHHHH |
| 234 | 2TOW91 | QVQLQESGGGLVQAGGSLRLSCAASGSIFSANAMGWYRQAPGKQRELVAVISS |
| | sdAb | GGSTNYADSVKGRFTISRDNAKNTVYLQMNSLKPEDTAVYYCMYSGSYYYTPN |
| | | DYWGQGTQVTVSSAAAYPYDVPDYGSHHHHHH |
| 235 | ACP301 | evqlvesggglvqpggslrlscaasgftfssytlawvrqapgkglewvaaidsssvtvspdtvrgrftisrdnakns |
| | | lylqmnslraedtavyycardsnwdaldywgqgttvtvssggggsggggsggggsdiqmtqspsslsasvgdr |
| | | vtitckasqnvgtnvgwyqqkpgkapkaliysasfrysgvpsrfsgsgsgtdftltisslqpedfatyycqqyvtv |
| | | pytfgggtkveikhhhhhh |
| 236 | Hu2TO | evqllesggglvqpggslrlscaasGSIFSANAMGwYrqapgkQReLvAVISSGGSTNYAD |
| | W91_A | SVKGrftisrdnskntVylqmnslraedtavyycMYSGSYYYTPNDYwgqgtlvtvssAAAY |
| | | PYDVPDYGSHHHHHH** |
| 237 | Hu2TO | evqllesggglvqpggslrlscaasGSIFSANAMGwYrqapgkgleLvAVISSGGSTNYADSVKGrft |
| | W91_B | isrdnskntVylqmnslraedtavyycMYSGSYYYTPNDYwgqgtlvtvssAAAYPYDVPDYGSH |
| | | HHHHH** |
| 238 | Hu2TO | evqllesggglvqpggslrlscaasGSIFSANAMGwvrqapgkglewvsVISSGGSTNYADSVKGrftis |
| | W91_C | rdnskntlylqmnslraedtavyycMYSGSYYYTPNDYwgqgtlvtvssAAAYPYDVPDYGSHHH |
| | | HHH** |
| 239 | Hu2TO | QvqllesggglyqpggslrlscaasGSIFSANAMGwYrqapgkQReLvAVISSGGSTNYADSVKG |
| | W91_D | rftisrdnskntVylqmnslraedtavyycMYSGSYYYTPNDYwgqgtlVtVssAAAYPYDVPDYGS |
| | | HHHHHH** |
| 240 | HE_LM_ | evqLlesggglVqpggslrlscaasgSIfsANamGwYrqapgkgReLvAVissggstNyadsvkgrftisrdnsknt |
| | 2TOW91 | VylqmnslraedtavyycMYSGSYYYTPNDYWgqgtlvtvssAAAYPYDVPDYGSHHHHHH |
| | | ** |
| 241 | HE_L_2 | QvqllesggglvqAggslrlscaasgSIfsANamGwYrqapgkQReLvAVissggstNyadsvkgrftisrdnsk |
| | TOW91 | ntVylqmnslraedtavyycMYSGSYYYTPNDYwgqgtlvtvssAAAYPYDVPDYGSHHHHH |
| | | H** |
| 242 | Hu3TO | evqllesggglvqpggslrlscaasERIFSTDVMGwYrqapgkQReLvAVVSARGTTNYLDAVKG |
| | W85_A | rftisrdnskntlylqmnslraedtavyycYVRETTSPWRIYwgqgtlvtvssAAAYPYDVPDYGSHH |
| | | HHHH** |
| 243 | Hu3TO | evqllesggglvqpggslrlscaasERIFSTDVMGwYrqapgkgleLvAVVSARGTTNYLDAVKGrf |
| | W85_B | tisrdnskntlylqmnslraedtavyycYVRETTSPWRIYwgqgtlvtvssAAAYPYDVPDYGSHHH |
| | | HHH** |
| 244 | Hu3TO | evqllesggglvqpggslrlscaasERIFSTDVMGwvrqapgkglewvsVVSARGTTNYLDAVKGrft |
| | W85_C | isrdnskntlylqmnslraedtavyycYVRETTSPWRIYwgqgtlvtvssAAAYPYDVPDYGSHHH |
| | | HHH** |
| 245 | Hu3TO | QvqllesggglvqpggslrlscaasERIFSTDVMGwYrqapgkQReLvAVVSARGTTNYLDAVK |
| | W85_D | GrftisrdnskntlylqmnslraedtavyycYVRETTSPWRIYwgqgtlvtvssAAAYPYDVPDYGSH |
| | | HHHHH** |
| 246 | HE_LM_ | evqllesggglvqpggslrlscaasERIfsTDVmGwYrqapgkgReLvAVVsARgTtNyLdsvkgrftisrdn |
| | 3TOW85 | skntlylqmnslraedtavyycYVRETTSPWRIywgqgtlvtvssAAAYPYDVPDYGSHHHHHH* |
| | | * |
| 247 | HE_L_3 | QvqllesggglvqEggslrlscaasERIfsTDVmGwYrqaAgkQReLvAVVsARgTtNyLdAvkgrftis |
| | TOW85 | rdnskntlylqmnslraedtaSyycYVRETTSPWRIywgqgtlvtvssAAAYPYDVPDYGSHHHHH |
| | | H** |
| 248 | HE_LM_ | evqllesggglvqpggslrlscaasERIfsTDVmGwYrqapgkgleLvAVVsARgTtNyLdsvkgrftisrdns |
| | R45_L3T | kntlylqmnslraedtavyycYVRETTSPWRIywgqgtlvtvssAAAYPYDVPDYGSHHHHHH** |
| | OW85 | |
| 249 | Hu3TO | evqllesggglvqpggslrlscaTsGTIFSGYTMGwYrqapgkQReLvAVISGGGDTNYADSVKG |
| | W69_A | rftisrdnskDtMylqmnslraedtavyycYSREVTPPWKLYwgqgtlvtvssAAAYPYDVPDYGSH |
| | | HHHHH** |
| 250 | Hu3TO | evqllesggglvqpggslrlscaTsGTIFSGYTMGwYrqapgkgleLvAVISGGGDTNYADSVKGrf |
| | W69_B | tisrdnskDtMylqmnslraedtavyycYSREVTPPWKLYwgqgtlvtvssAAAYPYDVPDYGSHH |
| | | HHHH** |
| 251 | Hu3TO | evqllesggglvqpggslrlscaasGTIFSGYTMGwvrqapgkglewvsVISGGGDTNYADSVKGrfti |
| | W69_C | srdnskntlylqmnslraedtavyycYSREVTPPWKLYwgqgtlvtvssAAAYPYDVPDYGSHHH |
| | | HHH** |
| 252 | Hu3TO | QvqllesggglvqpggslrlscaTsGTIFSGYTMGwYrqapgkQReLvAVISGGGDTNYADSVK |
| | W69_D | GrftisrdnskDtMylqmnslraedtavyycYSREVTPPWKLYwgqgtlvtvssAAAYPYDVPDYGS |
| | | HHHHHH** |
| 253 | Hu3TO | evqllesggglvqpggslrlscaTsGTIFSGYTMGwYrqapgkQReLvAVISGGGDTNYADSVKG |
| | W69_E | rftisrdnskntMylqmnslraedtavyycYSREVTPPWKLYwgqgtlvtvssAAAYPYDVPDYGSH |
| | | HHHHH** |
| 254 | HE_LM_ | evqllesggglvqpggslrlscaTsgTIfsGyTmGwYrqapgkgReLvAVisGggDtNyadsvkgrftisrdnsk |
| | 3TOW69 | ntMylqmnslraedtavyycYSREVTPPWKLywgqgtlvtvssAAAYPYDVPDYGSHHHHHH* |
| | | * |
| 255 | HE_L_3 | QvqllesggglvqTggslrlscaTsgTIfsGyTmGwYrqapgkQReLvAVisGggDtNyadsvkgrftisrdn |
| | TOW69 | skDtMylqmnslraedtavyycYSREVTPPWKLywgqgtlvtvssAAAYPYDVPDYGSHHHHH |
| | | H** |
| 256 | HE_LM_ | evqllesggglvqpggslrlscaTsgTIfsGyTmGwYrqapgkgleLvAVisGggDtNyadsvkgrftisrdnsk |
| | R45L_3T | ntMylqmnslraedtavyycYSREVTPPWKLywgqgtlvtvssAAAYPYDVPDYGSHHHHHH* |
| | OW69 | * |
| 257 | ACP363 | EVQLVESGGGLVQPGGSLRLSCAASGFTFSSYTLAWVRQAPGKGLEWVA |
| | | AIDSSSYTYSPDTVRGRFTISRDNAKNSLYLQMNSLRAEDTAVYYCARDS |
| | | NWDALDYWGQGTTVTVSSggggsggggsggggsDIQMTQSPSSLSASVGDRVT |
| | | ITCKAREKLWSAVAWYQQKPGKAPKALIYSASFRYSGVPSRFSGSGSGTD |
| | | FTLTISSLQPEDFATYYCQQYYTYPYTFGGGTKVEIKHHHHHH |
| 258 | ACP364 | EVQLVESGGGLVQPGGSLRLSCAASGFTFSSYTLAWVRQAPGKGLEWVAAIDSS |
| | | SYTYSPDTVRGRFTISRDNAKNSLYLQMNSLRAEDTAVYYCARDSNWDALDYW |
| | | GQGTTVTVSSggggsggggsggggsDIQMTQSPSSLSASVGDRVTITCKAREKLWSAV |
| | | AWYQQKPGKAPKsLIYSASFRYSGVPSRFSGSGSGTDFTLTISSLQPEDFATYYCQ |
| | | QYYTYPYTFGGGTKVEIKHHHHHH |
| 259 | ACP367 | EVQLVESGGGLVQPGGSLRLSCAASGFTFSSYTLAWVRQAPGKGLEWVA |
| | | AIDSSSYTYSPDTVRGRFTISRDNAKNSLYLQMNSLRAEDTAVYYCARDS |
| | | NWDALDYWGQGTTVTVSSggggsggggsggggsDIQMTQSPSSLSASVGDRVT |
| | | ITCKVTEKVWGNVAWYQQKPGKAPISLIYSPSLRKSGVPSRFSGSGSGTD |
| | | FTLTISSLQPEDFATYYCQQYYTYPYTFGGGTKVEIKHHHHHH |
| 260 | ACP369 | EVQLVESGGGLVQPGGSLRLSCAASGFTFSSYTLAWVRQAPGKGLEWVA |
| | | AIDSSSYTYSPDTVRGRFTISRDNAKNSLYLQMNSLRAEDTAVYYCARDS |
| | | NWDALDYWGQGTTVTVSSggggsggggsggggsDIQMTQSPSSLSASVGDRVT |
| | | ITCKSSEKLWANVAWYQQKPGKAPKALIYSASFRYSGVPSRFSGSGSGTD |
| | | FTLTISSLQPEDFATYYCQQYYTYPYTFGGGTKVEIKHHHHHH |
| 261 | ACP370 | EVQLVESGGGLVQPGGSLRLSCAASGFTFSSYTLAWVRQAPGKGLEWVAAIDSS |
| | | SYTYSPDTVRGRFTISRDNAKNSLYLQMNSLRAEDTAVYYCARDSNWDALDYW |
| | | GQGTTVTVSSggggsggggsggggsDIQMTQSPSSLSASVGDRVTITCKSSEKLWANVA |
| | | WYQQKPGKAPKsLIYSASFRYSGVPSRFSGSGSGTDFTLTISSLQPEDFATYYCQQ |
| | | YYTYPYTFGGGTKVEIKHHHHHH |
| 262 | ACP380 | DIQMTQSPSSLSASVGDRVTITCKASQNVGTNVGWYQQKPGKAPKALIY |
| | | SASFRYSGVPSRFSGSGSGTDFTLTISSLQPEDFATYYCQQYYTYPYTFGG |
| | | GTKVEIKrtvaapsvfifppsdeqlksgtasvvellnnfypreakvqwkvdnalqsgnsqesvteqdskdst |
| | | yslsstitlskadyekhkvyacevthqglsspvtksfnrgec |
| 263 | ACP381 | DIQMTQSPSSLSASVGDRVTITCKAREKLWSAVAWYQQKPGKAPKsLIYSASFR |
| | | YSGVPSRFSGSGSGTDFTLTISSLQPEDFATYYCQQYYTYPYTFGGGTKVEIKrtvaa |
| | | psvfifppsdeqlksgtasvvcllnnfypreakvqwkvdnalqsgnsqesvteqdskdstyslsstltlskadyekhkvyac |
| | | evthqglsspvtksfnrgec |
| 264 | ACP382 | DIQMTQSPSSLSASVGDRVTITCKVTEKVWGNVAWYQQKPGKAPISLIYSPSLRK |
| | | SGVPSRFSGSGSGTDFTLTISSLQPEDFATYYCQQYYTYPYTFGGGTKVEIKrtvaap |
| | | svfifppsdeqlksgtasvvcllnnfypreakvqwkvdnalqsgnsqesvteqdskdstyslssthlskadyekhkvyace |
| | | vthqglsspvtksfnrgec |
| 265 | ACP435 | DIQMTQSPSSLSASVGDRVTITCKAREKLWSAVAWYQQKPGKAPKsLIYS |
| | | ASFRYSGVPSRFSGSGSGTDFTLTISSLQPEDFATYYCQQYYTYPYTFGGG |
| | | TKVEIKrtvaapsvfifppsdeqlksgtasvvcllnnfypreakvqwkvdnalqsgnsqesvteqdskdsty |
| | | slsstltlskadyekhkvyacevthqglsspvtksfnrgecggggsggggsggggsggggsggggsggggsev |
| | | qllesggglvqpggslrlscaasgsifsanamgwyrqapgkqrelvavissggstnyadsvkgrftisrdnskntv |
| | | ylqmnslraedtavyycmysgsyyytpndywgqgtlvtvss** |
| 266 | ACP436 | DIQMTQSPSSLSASVGDRVTITCKAREKLWSAVAWYQQKPGKAPKsLIYSASFR |
| | | YSGVPSRFSGSGSGTDFTLTISSLQPEDFATYYCQQYYTYPYTFGGGTKVEIKrtvaa |
| | | psvfifppsdeqlksgtasvvcllnnfypreakvqwkvdnalqsgnsqesvteqdskdstyslsstltlskadyekhkvyac |
| | | evthqglsspvtksfnrgecggggsggggsggggsggggsggggsggggsevqllesggglvqpggslrlscaasgsifsa |
| | | namgwyrqapgkglelvavissggstnyadsvkgrftisrdnskntvylqmnslraedtavyycmysgsyyytpndyw |
| | | gqgtlvtvss** |
| 267 | ACP437 | DIQMTQSPSSLSASVGDRVTITCKVTEKVWGNVAWYQQKPGKAPISLIYSPSLRK |
| | | SGVPSRFSGSGSGTDFTLTISSLQPEDFATYYCQQYYTYPYTFGGGTKVEIKrtvaap |
| | | svfifppsdeqlksgtasvvcllnnfypreakvqwkvdnalqsgnsqesvteqdskdstyslssthlskadyekhkvyace |
| | | vthqglsspvtksfnrgecggggsggggsggggsggggsggggsggggsevqllesggglvqpggslrlscaasgsifsan |
| | | amgwyrqapgkqrelvavissggstnyadsvkgrftisrdnskntvylqmnslraedtavyycmysgsyyytpndywg |
| | | qgtlvtvss** |
| 268 | ACP438 | DIQMTQSPSSLSASVGDRVTITCKVTEKVWGNVAWYQQKPGKAPISLIYSPSLRK |
| | | SGVPSRFSGSGSGTDFTLTISSLQPEDFATYYCQQYYTYPYTFGGGTKVEIKrtvaap |
| | | svfifppsdeqlksgtasvvcllnnfypreakvqwkvdnalqsgnsqesvteqdskdstyslsstltskadyekhkvyace |
| | | vthqglsspvtksfnrgecggggsggggsggggsggggsggggsggggsevqllesggglvqpggslrlscaasgsifsan |
| | | amgwyrqapgkglelvavissggstnyadsvkgrftisrdnskntvylqmnslraedtavyycmysgsyyytpndywg |
| | | qgtlvtvss** |
| 269 | ACP448 | DIQMTQSPSSLSASVGDRVTITCKSSEKLWANVAWYQQKPGKAPKsLIYS |
| | | ASFRYSGVPSRFSGSGSGTDFTLTISSLQPEDFATYYCQQYYTYPYTFGGG |
| | | TKVEIKrtvaapsvfifppsdeqlksgtasvvcllnnfypreakvqwkvdnalqsgnsqesvteqdskdsty |
| | | slsstltlskadyekhkvyaceythqglsspytksfnrgec** |
| 270 | ACP449 | DIQMTQSPSSLSASVGDRVTITCKSSEKLWANVAWYQQKPGKAPKLLIYSASFR |
| | | YSGVPSRFSGSGSGTDFTLTISSLQPEDFATYYCQQYYTYPYTFGGGTKVEIKrtvaa |
| | | psvfifppsdeqlksgtasvvcllnnfypreakvqwkvdnalqsgnsqesvteqdskdstyslsstltlskadyekhkvyac |
| | | evthqglsspvtksfnrgec** |
| 271 | ACP450 | DIQMTQSPSSLSASVGDRVTITCKAREKLWSAVAWYQQKPGKAPKLLIYSASFR |
| | | YSGVPSRFSGSGSGTDFTLTISSLQPEDFATYYCQQYYTYPYTFGGGTKVEIKrtvaa |
| | | psvfifppsdeqlksgtasvvcllnnfypreakvqwkvdnalqsgnsqesvteqdskdstyslsstltlskadyekhkvyac |
| | | evthqglsspvtksfnrgec** |
| 272 | ACP439 | aptssstkktqlqlehllldlqmilnginnyknpkltrmltfkfympkkatelkhlgcleeelkpleevlnlaqsknf |
| | | hlrprdlisninvivlelkgsettfmceyadetativeflnrwitfcqsiistltsggpGPAGLYAQpgsEVQ |
| | | LVESGGGLVQPGNSLRLSCAASGFTFSKFGMSWVRQAPGKGLEWVSSIS |
| | | GSGRDTLYAESVKGRFTISRDNAKTTLYLQMNSLRPEDTAVYYCTIGGSL |
| | | SVSSQGTLVTVSSggggsggggsggggsggggsggggsggggssggpGPAGLYAQpgsEV |
| | | QLVESGGGLVQPGGSLRLSCAASGFTFSSYTLAWVRQAPGKGLEWVAAI |
| | | DSSSYTYSPDTVRGRFTISRDNAKNSLYLQMNSLRAEDTAVYYCARDSN |
| | | WDALDYWGQGTTVTVSSGGGGSGGGGSGGGGSDIQMTQSPSSLSASVG |
| | | DRVTITCKSSEKLWANVAWYQQKPGKAPKALIYSASFRYSGVPSRFSGSG |
| | | SGTDFTLTISSLQPEDFATYYCQQYYTYPYTFGGGTKVEIK |
| 273 | ACP440 | aptssstkktqlqlehllldlqmilnginnyknpkltrmltfkfympkkatelkhlqcleeelkpleevlnlaqsknfhlrprdli |
| | | sninvivlelkgsettfmceyadetativeflnrwitfcqsiistltsggpGPAGLYAQpgsEVQLVESGGGLV |
| | | QPGNSLRLSCAASGFTFSKFGMSWVRQAPGKGLEWVSSISGSGRDTLYAESVKG |
| | | RFTISRDNAKTTLYLQMNSLRPEDTAVYYCTIGGSLSVSSQGTLVTVSSggggsgggg |
| | | sggggsggggsggggsggggssggpGPAGLYAQpgsEVQLVESGGGLVQPGGSLRLSCAAS |
| | | GFTFSSYTLAWVRQAPGKGLEWVAAIDSSSYTYSPDTVRGRFTISRDNAKNSLY |
| | | LQMNSLRAEDTAVYYCARDSNWDALDYWGQGTTVTVSSGGGGSGGGGSGGG |
| | | GSDIQMTQSPSSLSASVGDRVTITCKSSEKLWANVAWYQQKPGKAPKsLIYSASF |
| | | RYSGVPSRFSGSGSGTDFTLTISSLQPEDFATYYCQQYYTYPYTFGGGTKVEIK |
| 274 | ACP441 | aptssstkktqlqlehllldlqmilnginnyknpkltrmltfkfympkkatelkhlqcleeelkpleevlnlaqsknfhlrprdli |
| | | sninvivlelkgsettfmceyadetativeflnrwitfcqsiistltsggpGPAGLYAQpgsEVQLVESGGGLV |
| | | QPGNSLRLSCAASGFTFSKFGMSWVRQAPGKGLEWVSSISGSGRDTLYAESVKG |
| | | RFTISRDNAKTTLYLQMNSLRPEDTAVYYCTIGGSLSVSSQGTLVTVSSggggsgggg |
| | | sggggsggggsggggsggggssggpGPAGLYAQpgsEVQLVESGGGLVQPGGSLRLSCAAS |
| | | GFTFSSYTLAWVRQAPGKGLEWVAAIDSSSYTYSPDTVRGRFTISRDNAKNSLY |
| | | LQMNSLRAEDTAVYYCARDSNWDALDYWGQGTTVTVSSGGGGSGGGGSGGG |
| | | GSDIQMTQSPSSLSASVGDRVTITCKSSEKLWANVAWYQQKPGKAPKLLIYSAS |
| | | FRYSGVPSRFSGSGSGTDFTLTISSLQPEDFATYYCQQYYTYPYTFGGGTKVEIK |
| 275 | ACP442 | aptssstkktqlqlehllldlqmilnginnyknpkltrmltfkfympkkatelkhlqcleeelkpleevlnlaqsknfhlrprdli |
| | | sninvivlelkgsettfmceyadetativeflnrwitfcqsiistltsggpGPAGLYAQpgsEVQLVESGGGLV |
| | | QPGNSLRLSCAASGFTFSKFGMSWVRQAPGKGLEWVSSISGSGRDTLYAESVKG |
| | | RFTISRDNAKTTLYLQMNSLRPEDTAVYYCTIGGSLSVSSQGTLVTVSSggggsgggg |
| | | sggggsggggsggggsggggssggpGPAGLYAQpgsEVQLVESGGGLVQPGGSLRLSCAAS |
| | | GFTFSSYTLAWVRQAPGKcLEWVAAIDSSSYTYSPDTVRGRFTISRDNAKNSLYL |
| | | QMNSLRAEDTAVYYCARDSNWDALDYWGQGTTVTVSSGGGGSGGGGSGGGG |
| | | SDIQMTQSPSSLSASVGDRVTITCKSSEKLWANVAWYQQKPGKAPKsLIYSASFR |
| | | YSGVPSRFSGSGSGTDFTLTISSLQPEDFATYYCQQYYTYPYTFGcGTKVEIK |
| 276 | ACP443 | aptssstkktqlqlehllldlqmilnginnyknpkltrmltfkfympkkatelkhlqcleeelkpleevlnlaqsknfhlrprdli |
| | | sninvivlelkgsettfmceyadetativeflnrwitfcqsiistltsggpGPAGLYAQpgsEVQLVESGGGLV |
| | | QPGNSLRLSCAASGFTFSKFGMSWVRQAPGKGLEWVSSISGSGRDTLYAESVKG |
| | | RFTISRDNAKTTLYLQMNSLRPEDTAVYYCTIGGSLSVSSQGTLVTVSSggggsgggg |
| | | sggggsggggsggggsggggssggpGPAGLYAQpgsEVQLVESGGGLVQPGGSLRLSCAAS |
| | | GFTFSSYTLAWVRQAPGKcLEWVAAIDSSSYTYSPDTVRGRFTISRDNAKNSLYL |
| | | QMNSLRAEDTAVYYCARDSNWDALDYWGQGTTVTVSSGGGGSGGGGSGGGG |
| | | SDIQMTQSPSSLSASVGDRVTITCKSSEKLWANVAWYQQKPGKAPKLLIYSASFR |
| | | YSGVPSRFSGSGSGTDFTLTISSLQPEDFATYYCQQYYTYPYTFGcGTKVEIK |
| 277 | ACP444 | aptssstkktqlqlehllldlqmilnginnyknpkltrmltfkfympkkatelkhlqcleeelkpleevlnlaqsknfhlrprdli |
| | | sninvivlelkgsettfmceyadetativeflnrwitfcqsiistltsggpGPAGLYAQpgsEVQLVESGGGLV |
| | | QPGNSLRLSCAASGFTFSKFGMSWVRQAPGKGLEWVSSISGSGRDTLYAESVKG |
| | | RFTISRDNAKTTLYLQMNSLRPEDTAVYYCTIGGSLSVSSQGTLVTVSSggggsgggg |
| | | sggggsggggsggggsggggssggpGPAGLYAQpgsEVQLVESGGGLVQPGGSLRLSCAAS |
| | | GFTFSSYTLAWVRQAPGKGLEWVAAIDSSSYTYSPDTVRGRFTISRDNAKNSLY |
| | | LQMNSLRAEDTAVYYCARDSNWDALDYWGcGTTVTVSSGGGGSGGGGSGGGG |
| | | SDIQMTQSPSSLSASVGDRVTITCKSSEKLWANVAWYQQKPGKcPKALIYSASFR |
| | | YSGVPSRFSGSGSGTDFTLTISSLQPEDFATYYCQQYYTYPYTFGGGTKVEIK |
| 278 | ACP445 | aptssstkktqlqlehllldlqmilnginnyknpkltrmltfkfympkkatelkhlqcleeelkpleevlnlaqsknfhlrprdli |
| | | sninvivlelkgsettfmceyadetativeflnrwitfcqsiistltsggpGPAGLYAQpgsEVQLVESGGGLV |
| | | QPGNSLRLSCAASGFTFSKFGMSWVRQAPGKGLEWVSSISGSGRDTLYAESVKG |
| | | RFTISRDNAKTTLYLQMNSLRPEDTAVYYCTIGGSLSVSSQGTLVTVSSggggsgggg |
| | | sggggsggggsggggsggggssggpGPAGLYAQpgsEVQLVESGGGLVQPGGSLRLSCAAS |
| | | GFTFSSYTLAWVRQAPGKGLEWVAAIDSSSYTYSPDTVRGRFTISRDNAKNSLY |
| | | LQMNSLRAEDTAVYYCARDSNWDALDYWGQGTTVTVSSsggpGPAGLYAQpgsD |
| | | IQMTQSPSSLSASVGDRVTITCKAREKLWSAVAWYQQKPGKAPKWYSASFRY |
| | | SGVPSRFSGSGSGTDFTLTISSLQPEDFATYYCQQYYTYPYTFGGGTKVEIK |
| 279 | ACP446 | aptssstkktqlqlehllldlqmilnginnyknpkltrmltfkfympkkatelkhlqcleeelkpleevlnlaqsknfhlrprdli |
| | | sninvivlelkgsettfmceyadetativeflnrwitfcqsiistltsggpGPAGLYAQpgsEVQLVESGGGLV |
| | | QPGNSLRLSCAASGFTFSKFGMSWVRQAPGKGLEWVSSISGSGRDTLYAESVKG |
| | | RFTISRDNAKTTLYLQMNSLRPEDTAVYYCTIGGSLSVSSQGTLVTVSSggggsgggg |
| | | sggggsggggsggggsggggssggpGPAGLYAQpgsEVQLVESGGGLVQPGGSLRLSCAAS |
| | | GFTFSSYTLAWVRQAPGKGLEWVAAIDSSSYTYSPDTVRGRFTISRDNAKNSLY |
| | | LQMNSLRAEDTAVYYCARDSNWDALDYWGQGTTVTVSSGGGGSGGGGSGGG |
| | | GSDIQMTQSPSSLSASVGDRVTITCKAREKLWSAVAWYQQKPGKAPKWYSAS |
| | | FRYSGVPSRFSGSGSGTDFTLTISSLQPEDFATYYCQQYYTYPYTFGGGTKVEIK |
| 280 | ACP447 | aptssstkktqlqlehllldlqmilnginnyknpkltrmltfkfympkkatelkhlqcleeelkpleevlnlaqsknfhlrprdli |
| | | sninvivlelkgsettfmceyadetativeflnrwitfcqsiistltsggpGPAGLYAQpgsEVQLVESGGGLV |
| | | QPGNSLRLSCAASGFTFSKFGMSWVRQAPGKGLEWVSSISGSGRDTLYAESVKG |
| | | RFTISRDNAKTTLYLQMNSLRPEDTAVYYCTIGGSLSVSSQGTLVTVSSggggsgggg |
| | | sggggsggggsggggsggggssggpGPAGLYAQpgsEVQLVESGGGLVQPGGSLRLSCAAS |
| | | GFTFSSYTLAWVRQAPGKcLEWVAAIDSSSYTYSPDTVRGRFTISRDNAKNSLYL |
| | | QMNSLRAEDTAVYYCARDSNWDALDYWGQGTTVTVSSGGGGSGGGGSGGGG |
| | | SDIQMTQSPSSLSASVGDRVTITCKAREKLWSAVAWYQQKPGKAPKLLIYSASF |
| | | RYSGVPSRFSGSGSGTDFTLTISSLQPEDFATYYCQQYYTYPYTFGcGTKVEIK |
| 281 | ACP451 | aptssstkktqlqlehllldlqmilnginnyknpkltrmltfldympkkatelkhlqcleeelkpleevlnlaqsknf |
| | | hlrprdlisninvivlelkgsettfmceyadetativeflnrwitfcqsiistltsggpALFKSSFPpgsEVQL |
| | | VESGGGLVQPGNSLRLSCAASGFTFSKFGMSWVRQAPGKGLEWVSSISG |
| | | SGRDTLYAESVKGRFTISRDNAKTTLYLQMNSLRPEDTAVYYCTIGGSLS |
| | | VSSQGTLVTVSSggggsggggsggggsggggsggggsggggssggpALFKSSFPpgsEVQL |
| | | VESGGGLVQPGGSLRLSCAASGFTFSSYTLAWVRQAPGKGLEWVAAIDS |
| | | SSYTYSPDTVRGRFTISRDNAKNSLYLQMNSLRAEDTAVYYCARDSNWD |
| | | ALDYWGQGTTVTVSSGGGGSGGGGSGGGGSDIQMTQSPSSLSASVGDRV |
| | | TITCKAREKLWSAVAWYQQKPGKAPKsLIYSASFRYSGVPSRFSGSGSGT |
| | | DFTLTISSLQPEDFATYYCQQYYTYPYTFGGGTKVEIK** |
| 282 | ACP452 | aptssstkktqlqlehllldlqmilnginnyknpkltrmltfkfympkkatelkhlqcleeelkpleevlnlaqsknfhlrprdli |
| | | sninvivlelkgsettfmceyadetativeflnrwitfcqsiistltsggpALFKSSFPpgsEVQLVESGGGLVQ |
| | | PGNSLRLSCAASGFTFSKFGMSWVRQAPGKGLEWVSSISGSGRDTLYAESVKGR |
| | | FTISRDNAKTTLYLQMNSLRPEDTAVYYCTIGGSLSVSSQGTLVTVSSggggsggggs |
| | | ggggsggggsggggsggggssggpALFKSSFPpgsEVQLVESGGGLVQPGGSLRLSCAASGF |
| | | TFSSYTLAWVRQAPGKGLEWVAAIDSSSYTYSPDTVRGRFTISRDNAKNSLYLQ |
| | | MNSLRAEDTAVYYCARDSNWDALDYWGQGTTVTVSSGGGGSGGGGSGGGGS |
| | | DIQMTQSPSSLSASVGDRVTITCKVTEKVWGNVAWYQQKPGKAPISLIYSPSLRK |
| | | SGVPSRFSGSGSGTDFTLTISSLQPEDFATYYCQQYYTYPYTFGGGTKVEIK** |
| 283 | ACP453 | aptssstkktqlqlehllldlqmilnginnyknpkltrmltfkfympkkatelkhlqcleeelkpleevlnlaqsknfhlrprdli |
| | | sninvivlelkgsettfmceyadetativeflnrwitfcqsiistltsggpALFKSSFPpgsEVQLVESGGGLVQ |
| | | PGNSLRLSCAASGFTFSKFGMSWVRQAPGKGLEWVSSISGSGRDTLYAESVKGR |
| | | FTISRDNAKTTLYLQMNSLRPEDTAVYYCTIGGSLSVSSQGTLVTVSSggggsggggs |
| | | ggggsggggsggggsggggssggpALFKSSFPpgsEVQLVESGGGLVQPGGSLRLSCAASGF |
| | | TFSSYTLAWVRQAPGKcLEWVAAIDSSSYTYSPDTVRGRFTISRDNAKNSLYLQ |
| | | MNSLRAEDTAVYYCARDSNWDALDYWGQGTTVTVSSGGGGSGGGGSGGGGS |
| | | DIQMTQSPSSLSASVGDRVTITCKAREKLWSAVAWYQQKPGKAPKsLIYSASFR |
| | | YSGVPSRFSGSGSGTDFTLTISSLQPEDFATYYCQQYYTYPYTFGcGTKVEIK** |
| 284 | ACP454 | aptssstkktqlqlehllldlqmilnginnyknpkltrmltfkfympkkatelkhlqcleeelkpleevlnlaqsknfhlrprdli |
| | | sninvivlelkgsettfmceyadetativeflnrwitfcqsiistltsggpALFKSSFPpgsEVQLVESGGGLVQ |
| | | PGNSLRLSCAASGFTFSKFGMSWVRQAPGKGLEWVSSISGSGRDTLYAESVKGR |
| | | FTISRDNAKTTLYLQMNSLRPEDTAVYYCTIGGSLSVSSQGTLVTVSSggggsggggs |
| | | ggggsggggsggggsggggssggpALFKSSFPpgsEVQLVESGGGLVQPGGSLRLSCAASGF |
| | | TFSSYTLAWVRQAPGKGLEWVAAIDSSSYTYSPDTVRGRFTISRDNAKNSLYLQ |
| | | MNSLRAEDTAVYYCARDSNWDALDYWGcGTTVTVSSGGGGSGGGGSGGGGSD |
| | | IQMTQSPSSLSASVGDRVTITCKAREKLWSAVAWYQQKPGKcPKALIYSASFRYS |
| | | GVPSRFSGSGSGTDFTLTISSLQPEDFATYYCQQYYTYPYTFGGGTKVEIK** |
| 285 | ACP455 | aptssstkktqlqlehllldlqmilnginnyknpkltrmltfkfympkkatelkhlqcleeelkpleevlnlaqsknfhlrprdli |
| | | sninvivlelkgsettfmceyadetativeflnrwitfcqsiistltsggpALFKSSFPpgsEVQLVESGGGLVQ |
| | | PGNSLRLSCAASGFTFSKFGMSWVRQAPGKGLEWVSSISGSGRDTLYAESVKGR |
| | | FTISRDNAKTTLYLQMNSLRPEDTAVYYCTIGGSLSVSSQGTLVTVSSggggsggggs |
| | | ggggsggggsggggsggggssggpALFKSSFPpgsEVQLVESGGGLVQPGGSLRLSCAASGF |
| | | TFSSYTLAWVRQAPGKcLEWVAAIDSSSYTYSPDTVRGRFTISRDNAKNSLYLQ |
| | | MNSLRAEDTAVYYCARDSNWDALDYWGQGTTVTVSSGGGGSGGGGSGGGGS |
| | | DIQMTQSPSSLSASVGDRVTITCKVTEKVWGNVAWYQQKPGKAPISLIYSPSLRK |
| | | SGVPSRFSGSGSGTDFTLTISSLQPEDFATYYCQQYYTYPYTFGcGTKVEIK** |
| 441 | ACP456 | aptssstkktqlqlehllldlqmilnginnyknpkltrmltfkfympkkatelkhlqcleeelkpleevlnlaqsknfhlrprdli |
| | | sninvivlelkgsettfmceyadetativeflnrwitfcqsiistltsggpALFKSSFPpgsEVQLVESGGGLVQ |
| | | PGNSLRLSCAASGFTFSKFGMSWVRQAPGKGLEWVSSISGSGRDTLYAESVKGR |
| | | FTISRDNAKTTLYLQMNSLRPEDTAVYYCTIGGSLSVSSQGTLVTVSSggggsggggs |
| | | ggggsggggsggggsggggssggpALFKSSFPpgsEVQLVESGGGLVQPGGSLRLSCAASGF |
| | | TFSSYTLAWVRQAPGKGLEWVAAIDSSSYTYSPDTVRGRFTISRDNAKNSLYLQ |
| | | MNSLRAEDTAVYYCARDSNWDALDYWGcGTTVTVSSGGGGSGGGGSGGGGSD |
| | | IQMTQSPSSLSASVGDRVTITCKVTEKVWGNVAWYQQKPGKcPISLIYSPSLRKS |
| | | GVPSRFSGSGSGTDFTLTISSLQPEDFATYYCQQYYTYPYTFGGGTKVEIK** |
| 286 | ACP457 | aptssstkktqlqlehllldlqmilnginnyknpkltrmltfkfympkkatelkhlqcleeelkpleevlnlaqsknfhlrprdli |
| | | sninvivlelkgsettfmceyadetativeflnrwitfcqsiistltsggpALFKSSFPpgsEVQLVESGGGLVQ |
| | | PGNSLRLSCAASGFTFSKFGMSWVRQAPGKGLEWVSSISGSGRDTLYAESVKGR |
| | | FTISRDNAKTTLYLQMNSLRPEDTAVYYCTIGGSLSVSSQGTLVTVSSggggsggggs |
| | | ggggsggggsggggsggggssggpALFKSSFPpgsEVQLVESGGGLVQPGGSLRLSCAASGF |
| | | TFSSYTLAWVRQAPGKGLEWVAAIDSSSYTYSPDTVRGRFTISRDNAKNSLYLQ |
| | | MNSLRAEDTAVYYCARDSNWDALDYWGQGTTVTVSSastkgpsvfplapsskstsggtaalg |
| | | clvkdyfpepvtvswnsgaltsgvhtfpavlqssglyslssvvtvpssslgtqtyicnvnhkpsntkvdkrvepksc** |
| 287 | ACP458 | eskygppcppcpapeflggpsvflfppkpkdtlmisrtpevtcvvvdvsqedpevqfnwyvdgvevhnaktkpreeqf |
| | | nstyrvvsvltvlhqdwlngkeykckvsnkglpssiektiskakgqprepqvytlppsqeemtknqvsltclvkgfypsdi |
| | | avewesngqpennykttppvldsdgsfflysrltvdksrwqegnvfscsvmhealhnhytqkslslslgksggpALFK |
| | | SSFPpgsaptssstkktqlqlehllldlqmilnginnyknpkltrmltfkfympkkatelkhlqcleeelkpleevlnlaqsk |
| | | nfhlrprdlisninvivlelkgsettfmceyadetativeflnrwitfcqsiistltggggsggggsggggsggggsggggsgg |
| | | ggssggpALFK SSFPpgsEVQLVESGGGLVQPGGSLRLSCAASGFTFSSYTLAWVRQ |
| | | APGKGLEWVAAIDSSSYTYSPDTVRGRFTISRDNAKNSLYLQMNSLRAEDTAVY |
| | | YCARDSNWDALDYWGQGTTVTVSSastkgpsvfplapsskstsggtaalgclvkdyfpepvtvswnsg |
| | | altsgvhtfpavlqssglyslssvvtvpssslgtqtyicnvnhkpsntkvdkrvepksc** |
| 288 | ACP459 | eskygppcppcpapeflggpsvflfppkpkdtlmisrtpevtcvvvdvsqedpevqfnwyvdgvevhnaktkpreeqf |
| | | nstyrvvsvltvlhqdwlngkeykckvsnkglpssiektiskakgqprepqvytlppsqeemtknqvsltclvkgfypsdi |
| | | avewesngqpennykttppvldsdgsfflysrltvdksrwqegnvfscsvmhealhnhytqkslslslgksggpALFK |
| | | SSFPpgsaptssstkktqlqlehllldlqmilnginnyknpkltrmltfkfympkkatelkhlqcleeelkpleevlnlaqsk |
| | | nfhlrprdlisninvivlelkgsettfmceyadetativeflnrwitfcqsiistltggggsggggsggggsggggsggggsgg |
| | | ggssggpALFKSSFPpgsEVQLVESGGGLVQPGGSLRLSCAASGFTFSSYTLAWVRQ |
| | | APGKGLEWVAAIDSSSYTYSPDTVRGRFTISRDNAKNSLYLQMNSLRAEDTAVY |
| | | YCARDSNWDALDYWGQGTTVTVSSGGGGSGGGGSGGGGSDIQMTQSPSSLSAS |
| | | VGDRVTITCKAREKLWSAVAWYQQKPGKAPKsLIYSASFRYSGVPSRFSGSGSG |
| | | TDFTLTISSLQPEDFATYYCQQYYTYPYTFGGGTKVEIK** |
| 289 | ACP460 | eskygppcppcpapeflggpsvflfppkpkdtlmisrtpevtcvvvdvsqedpevqfnwyvdgvevhnaktkpreeqf |
| | | nstyrvvsvltvlhqdwlngkeykckvsnkglpssiektiskakgqprepqvytlppsqeemtknqvsltclvkgfypsdi |
| | | avewesngqpennykttppvldsdgsfflysrltvdksrwqegnvfscsvmhealhnhytqkslslslgksggpALFK |
| | | SSFPpgsaptssstkktqlqlehllldlqmilnginnyknpkltrmltfkfympkkatelkhlqcleeelkpleevlnlaqsk |
| | | nfhlrprdlisninvivlelkgsettfmceyadetativeflnrwitfcqsiistltggggsggggsggggsggggsggggsgg |
| | | ggssggpALFKSSFPpgsEVQLVESGGGLVQPGGSLRLSCAASGFTFSSYTLAWVRQ |
| | | APGKGLEWVAAIDSSSYTYSPDTVRGRFTISRDNAKNSLYLQMNSLRAEDTAVY |
| | | YCARDSNWDALDYWGQGTTVTVSSGGGGSGGGGSGGGGSDIQMTQSPSSLSAS |
| | | VGDRVTITCKVTEKVWGNVAWYQQKPGKAPISLIYSPSLRKSGVPSRFSGSGSG |
| | | TDFTLTISSLQPEDFATYYCQQYYTYPYTFGGGTKVEIK** |
| 290 | ACP461 | eskygppcppcpapeflggpsvflfppkpkdtlmisrtpevtcvvvdvsqedpevqfnwyvdgvevhnaktkpreeqf |
| | | nstyrvvsvltvlhqdwlngkeykckvsnkglpssiektiskakgqprepqvytlppsqeemtknqvsltclvkgfypsdi |
| | | avewesngqpennykttppvldsdgsfflysrltvdksrwqegnvfscsvmhealhnhytqkslslslgksggpALFK |
| | | SSFPpgsaptssstkktqlqlehllldlqmilnginnyknpkltrmltfkfympkkatelkhlqcleeelkpleevlnlaqsk |
| | | nfhlrprdlisninvivlelkgsettfmceyadetativeflnrwitfcqsiistltggggsggggsggggsggggsggggsgg |
| | | ggssggpALFKSSFPpgsEVQLVESGGGLVQPGGSLRLSCAASGFTFSSYTLAWVRQ |
| | | APGKcLEWVAAIDSSSYTYSPDTVRGRFTISRDNAKNSLYLQMNSLRAEDTAVY |
| | | YCARDSNWDALDYWGQGTTVTVSSGGGGSGGGGSGGGGSDIQMTQSPSSLSAS |
| | | VGDRVTITCKAREKLWSAVAWYQQKPGKAPKsLIYSASFRYSGVPSRFSGSGSG |
| | | TDFTLTISSLQPEDFATYYCQQYYTYPYTFGcGTKVEIK** |
| 291 | ACP462 | eskygppcppcpapeflggpsvflfppkpkdtlmisrtpevtcvvvdvsqedpevqfnwyvdgvevhnaktkpreeqf |
| | | nstyrvvsvltvlhqdwlngkeykckvsnkglpssiektiskakgqprepqvytlppsqeemtknqvsltclvkgfypsdi |
| | | avewesngqpennykttppvldsdgsfflysrltvdksrwqegnvfscsvmhealhnhytqkslslslgksggpALFK |
| | | SSFPpgsaptssstkktqlqlehllldlqmilnginnyknpkltrmltfkfympkkatelkhlqcleeelkpleevlnlaqsk |
| | | nfhlrprdlisninvivlelkgsettfmceyadetativeflnrwitfcqsiistltggggsggggsggggsggggsggggsgg |
| | | ggssggpALFKSSFPpgsEVQLVESGGGLVQPGGSLRLSCAASGFTFSSYTLAWVRQ |
| | | APGKGLEWVAAIDSSSYTYSPDTVRGRFTISRDNAKNSLYLQMNSLRAEDTAVY |
| | | YCARDSNWDALDYWGcGTTVTVSSGGGGSGGGGSGGGGSDIQMTQSPSSLSAS |
| | | VGDRVTITCKAREKLWSAVAWYQQKPGKcPKALIYSASFRYSGVPSRFSGSGSG |
| | | TDFTLTISSLQPEDFATYYCQQYYTYPYTFGGGTKVEIK** |
| 292 | ACP463 | eskygppcppcpapeflggpsvflfppkpkdtlmisrtpevtcvvvdvsqedpevqfnwyvdgvevhnaktkpreeqf |
| | | nstyrvvsvltvlhqdwlngkeykckvsnkglpssiektiskakgqprepqvytlppsqeemtknqvsltclvkgfypsdi |
| | | avewesngqpennykttppvldsdgsfflysrltvdksrwqegnvfscsvmhealhnhytqkslslslgksggpALFK |
| | | SSFPpgsaptssstkktqlqlehllldlqmilnginnyknpkltrmltfkfympkkatelkhlqcleeelkpleevlnlaqsk |
| | | nfhlrprdlisninvivlelkgsettfmceyadetativeflnrwitfcqsiistltggggsggggsggggsggggsggggsgg |
| | | ggssggpALFKSSFPpgsEVQLVESGGGLVQPGGSLRLSCAASGFTFSSYTLAWVRQ |
| | | APGKcLEWVAAIDSSSYTYSPDTVRGRFTISRDNAKNSLYLQMNSLRAEDTAVY |
| | | YCARDSNWDALDYWGQGTTVTVSSGGGGSGGGGSGGGGSDIQMTQSPSSLSAS |
| | | VGDRVTITCKVTEKVWGNVAWYQQKPGKAPISLIYSPSLRKSGVPSRFSGSGSG |
| | | TDFTLTISSLQPEDFATYYCQQYYTYPYTFGcGTKVEIK** |
| 293 | ACP464 | eskygppcppcpapeflggpsvflfppkpkdtlmisrtpevtcvvvdvsqedpevqfnwyvdgvevhnaktkpreeqf |
| | | nstyrvvsvltvlhqdwlngkeykckvsnkglpssiektiskakgqprepqvytlppsqeemtknqvsltclvkgfypsdi |
| | | avewesngqpennykttppvldsdgsfflysrltvdksrwqegnvfscsvmhealhnhytqkslslslgksggpALFK |
| | | SSFPpgsaptssstkktqlqlehllldlqmilnginnyknpkltrmltfkfympkkatelkhlqcleeelkpleevlnlaqsk |
| | | nfhlrprdlisninvivlelkgsettfmceyadetativeflnrwitfcqsiistltggggsggggsggggsggggsggggsgg |
| | | ggssggpALFKSSFPpgsEVQLVESGGGLVQPGGSLRLSCAASGFTFSSYTLAWVRQ |
| | | APGKGLEWVAAIDSSSYTYSPDTVRGRFTISRDNAKNSLYLQMNSLRAEDTAVY |
| | | YCARDSNWDALDYWGcGTTVTVSSGGGGSGGGGSGGGGSDIQMTQSPSSLSAS |
| | | VGDRVTITCKVTEKVWGNVAWYQQKPGKcPISLIYSPSLRKSGVPSRFSGSGSGT |
| | | DFTLTISSLQPEDFATYYCQQYYTYPYTFGGGTKVEIK** |
| 294 | ACP465 | vprdcgckpcictypevssvfifppkpkdvltitltpkvtcvvvdiskddpevqfswfvddvevhtaqtqpreeqfnstfrsv |
| | | selpimhqdwlngkefkcrvnsaafpapiektisktkgrpkapqvytipppkeqmakdkvsltcmitdffpeditvewq |
| | | wngqpaenykntqpimdtdgsyfvysklnvqksnweagntftcsvlheglhnhhtekslshspgksggpALFKSSF |
| | | Ppgsaptssstkktqlqlehllldlqmilnginnyknpkltrmltfkfympkkatelkhlqcleeelkpleevlnlaqsknfhlr |
| | | prdlisninvivlelkgsettfmceyadetativeflnrwitfcqsiistltggggsggggsggggsggggsggggsggggssg |
| | | gpALFKSSFPpgsEVQLVESGGGLVQPGGSLRLSCAASGFTFSSYTLAWVRQAPGK |
| | | GLEWVAAIDSSSYTYSPDTVRGRFTISRDNAKNSLYLQMNSLRAEDTAVYYCAR |
| | | DSNWDALDYWGQGTTVTVSSGGGGSGGGGSGGGGSDIQMTQSPSSLSASVGDR |
| | | VTITCKAREKLWSAVAWYQQKPGKAPKsLIYSASFRYSGVPSRFSGSGSGTDFTL |
| | | TISSLQPEDFATYYCQQYYTYPYTFGGGTKVEIK** |
| 295 | ACP466 | vprdcgckpcictypevssvfifppkpkdvltitltpkvtcvvvdiskddpevqfswfvddvevhtaqtqpreeqfnstfrsv |
| | | selpimhqdwlngkefkcrvnsaafpapiektisktkgrpkapqvytipppkeqmakdkvsltcmitdffpeditvewq |
| | | wngqpaenykntqpimdtdgsyfyysklnvqksnweagntftcsvlheglhnhhtekslshspgksggpALFKSSF |
| | | Ppgsaptssstkktqlqlehllldlqmilnginnyknpkltrmltfkfympkkatelkhlqcleeelkpleevlnlaqsknfhlr |
| | | prdlisninvivlelkgsettfmceyadetativeflnrwitfcqsiistltggggsggggsggggsggggsggggsggggssg |
| | | gpALFKSSFPpgsEVQLVESGGGLVQPGGSLRLSCAASGFTFSSYTLAWVRQAPGK |
| | | GLEWVAAIDSSSYTYSPDTVRGRFTISRDNAKNSLYLQMNSLRAEDTAVYYCAR |
| | | DSNWDALDYWGQGTTVTVSSGGGGSGGGGSGGGGSDIQMTQSPSSLSASVGDR |
| | | VTITCKVTEKVWGNVAWYQQKPGKAPISLIYSPSLRKSGVPSRFSGSGSGTDFTL |
| | | TISSLQPEDFATYYCQQYYTYPYTFGGGTKVEIK** |
| 296 | ACP467 | vprdcgckpcictypevssvfifppkpkdvltitltpkvtcvvvdiskddpevqfswfvddvevhtaqtqpreeqfnstfrsv |
| | | selpimhqdwlngkefkcrvnsaafpapiektisktkgrpkapqvytipppkeqmakdkvsltcmitdffpeditvewq |
| | | wngqpaenykntqpimdtdgsyfvysklnvqksnweagntftcsvlheglhnhhtekslshspgksggpALFKSSF |
| | | Ppgsaptssstkktqlqlehllldlqmilnginnyknpkltrmltfkfympkkatelkhlqcleeelkpleevlnlaqsknfhlr |
| | | prdlisninvivlelkgsettfmceyadetativeflnrwitfcqsiistltggggsggggsggggsggggsggggsggggssg |
| | | gpALFKSSFPpgsEVQLVESGGGLVQPGGSLRLSCAASGFTFSSYTLAWVRQAPGK |
| | | cLEWVAAIDSSSYTYSPDTVRGRFTISRDNAKNSLYLQMNSLRAEDTAVYYCAR |
| | | DSNWDALDYWGQGTTVTVSSGGGGSGGGGSGGGGSDIQMTQSPSSLSASVGDR |
| | | VTITCKAREKLW SAVAWYQQKPGKAPKsLIYSASFRYSGVPSRFSGSGSGTDFTL |
| | | TISSLQPEDFATYYCQQYYTYPYTFGcGTKVEIK** |
| 297 | ACP468 | vprdcgckpcictvpevssvfifppkpkdvltitltpkvtcvvvdiskddpevqfswfvddvevhtaqtqpreeqfnstfrsv |
| | | selpimhqdwlngkefkcrvnsaafpapiektisktkgrpkapqvytipppkeqmakdkvsltcmitdffpeditvewq |
| | | wngqpaenykntqpimdtdgsyfvysklnvqksnweagntftcsvlheglhnhhtekslshspgksggpALFKSSF |
| | | Ppgsaptssstkktqlqlehllldlqmilnginnyknpkltrmltfkfympkkatelkhlqcleeelkpleevlnlaqsknfhlr |
| | | prdlisninvivlelkgsettfmceyadetativeflnrwitfcqsiistltggggsggggsggggsggggsggggsggggssg |
| | | gpALFKSSFPpgsEVQLVESGGGLVQPGGSLRLSCAASGFTFSSYTLAWVRQAPGK |
| | | GLEWVAAIDSSSYTYSPDTVRGRFTISRDNAKNSLYLQMNSLRAEDTAVYYCAR |
| | | DSNWDALDYWGcGTTVTVSSGGGGSGGGGSGGGGSDIQMTQSPSSLSASVGDR |
| | | VTITCKAREKLW SAVAWYQQKPGKcPKALIYSASFRYSGVPSRFSGSGSGTDFTL |
| | | TISSLQPEDFATYYCQQYYTYPYTFGGGTKVEIK** |
| 298 | ACP469 | vprdcgckpcictvpevssvfifppkpkdvltitltpkvtcvvvdiskddpevqfswfvddvevhtaqtqpreeqfnstfrsv |
| | | selpimhqdwlngkefkcrvnsaafpapiektisktkgrpkapqvytipppkeqmakdkvsltcmitdffpeditvewq |
| | | wngqpaenykntqpimdtdgsyfvysklnvqksnweagntftcsvlheglhnhhtekslshspgksggpALFKSSF |
| | | Ppgsaptssstkktqlqlehllldlqmilnginnyknpkltrmltfkfympkkatelkhlqcleeelkpleevlnlaqsknfhlr |
| | | prdlisninvivlelkgsettfmceyadetativeflnrwitfcqsiistltggggsggggsggggsggggsggggsggggssg |
| | | gpALFKSSFPpgsEVQLVESGGGLVQPGGSLRLSCAASGFTFSSYTLAWVRQAPGK |
| | | cLEWVAAIDSSSYTYSPDTVRGRFTISRDNAKNSLYLQMNSLRAEDTAVYYCAR |
| | | DSNWDALDYWGQGTTVTVSSGGGGSGGGGSGGGGSDIQMTQSPSSLSASVGDR |
| | | VTITCKVTEKVWGNVAWYQQKPGKAPISLIYSPSLRKSGVPSRFSGSGSGTDFTL |
| | | TISSLQPEDFATYYCQQYYTYPYTFGcGTKVEIK** |
| 299 | ACP470 | vprdcgckpcictvpevssvfifppkpkdvltitltpkvtcvvvdiskddpevqfswfvddvevhtaqtqpreeqfnstfrsv |
| | | selpimhqdwlngkefkcrvnsaafpapiektisktkgrpkapqvytipppkeqmakdkvsltcmitdffpeditvewq |
| | | wngqpaenykntqpimdtdgsyfvysklnvqksnweagntftcsvlheglhnhhtekslshspgksggpALFKSSF |
| | | Ppgsaptssstkktqlqlehllldlqmilnginnyknpkltrmltfkfympkkatelkhlqcleeelkpleevlnlaqsknfhlr |
| | | prdlisninvivlelkgsettfmceyadetativeflnrwitfcqsiistltggggsggggsggggsggggsggggsggggssg |
| | | gpALFKSSFPpgsEVQLVESGGGLVQPGGSLRLSCAASGFTFSSYTLAWVRQAPGK |
| | | GLEWVAAIDSSSYTYSPDTVRGRFTISRDNAKNSLYLQMNSLRAEDTAVYYCAR |
| | | DSNWDALDYWGcGTTVTVSSGGGGSGGGGSGGGGSDIQMTQSPSSLSASVGDR |
| | | VTITCKVTEKVWGNVAWYQQKPGKcPISLIYSPSLRKSGVPSRFSGSGSGTDFTLT |
| | | ISSLQPEDFATYYCQQYYTYPYTFGGGTKVEIK** |
| 300 | ACP471 | mdmrvpaqllgllllwlrgarcvprdcgckpcictvpevssvfifppkpkdvltitltpkvtcvvvdiskddpevqfswfvd |
| | | dvevhtaqtqpreeqfnstfrsyselpimhqdwlngkefkcrvnsaafpapiektisktkgrpkapqvytipppkeqmak |
| | | dkvsltcmitdffpeditvewqwngqpaenykntqpimdtdgsyfvysklnvqksnweagntftcsvlheglhnhhtek |
| | | slshspgksggpALFKSSFPpgsaptssstkktqlqlehllldlqmilnginnyknpkltrmltfkfympkkatelkhlq |
| | | cleeelkpleevlnlaqsknfhlrprdlisninvivlelkgsettfmceyadetativeflnrwitfcqsiistltggggsggggsg |
| | | gggsggggsggggsggggssggpALFKSSFPpgsEVQLVESGGGLVQPGGSLRLSCAASGFT |
| | | FSSYTLAWVRQAPGKGLEWVAAIDSSSYTYSPDTVRGRFTISRDNAKNSLYLQM |
| | | NSLRAEDTAVYYCARDSNWDALDYWGQGTTVTVSSastkgpsvfplapsskstsggtaalgcl |
| | | vkdyfpepvtvswnsgaltsgvhtfpavlqssglyslssvvtvpssslgtqtyicnvnhkpsntkvdkrvepksc** |
| 301 | ACP382 | DIQMTQSPSSLSASVGDRVTITCKVTEKVWGNVAWYQQKPGKAPISLIYS |
| | | PSLRKSGVPSRFSGSGSGTDFTLTISSLQPEDFATYYCQQYYTYPYTFGGG |
| | | TKVEIKrtvaapsvfifppsdeqlksgtasvvcllnnfypreakvqwkvdnalqsgnsqesvteqdskdsty |
| | | slssthlskadyekhkvyacevthqglsspvtksfnrgec** |
| 302 | ACP383 | eskygppcppcpapeflggpsvflfppkpkdtlmisrtpevtcvvvdvsqedpevqfnwyvdgvevhnaktkpreeqf |
| | | nstyrvvsvltvlhqdwlngkeykckvsnkglpssiektiskakgqprepqvytlppsqeemtknqvsltclvkgfypsdi |
| | | avewesngqpennykttppvldsdgsfflysrltvdksrwqegnvfscsvmhealhnhytqkslslslgksggpGPAG |
| | | LYAQpgsaptssstkktqlqlehllldlqmilnginnyknpkltrmltfkfympkkatelkhlqcleeelkpleevlnlaqs |
| | | knfhlrprdlisninvivlelkgsettfmceyadetativeflnrwitfcqsiistltggggsggggsggggsggggsggggsg |
| | | gggssggpGPAGLYAQpgsEVQLVESGGGLVQPGGSLRLSCAASGFTFSSYTLAWVR |
| | | QAPGKcLEWVAAIDSSSYTYSPDTVRGRFTISRDNAKNSLYLQMNSLRAEDTAV |
| | | YYCARDSNWDALDYWGQGTTVTVSSGGGGSGGGGSGGGGSDIQMTQSPSSLS |
| | | ASVGDRVTITCKASQNVGTNVGWYQQKPGKAPKALIYSASFRYSGVPSRFSGSG |
| | | SGTDFTLTISSLQPEDFATYYCQQYYTYPYTFGcGTKVEIK** |
| 303 | ACP384 | eskygppcppcpapeflggpsvflfppkpkdtlmisrtpevtcvvvdvsqedpevqfnwyvdgvevhnaktkpreeqf |
| | | nstyrvvsvltvlhqdwlngkeykckvsnkglpssiektiskakgqprepqvytlppsqeemtknqvsltclvkgfypsdi |
| | | avewesngqpennykttppvldsdgsfflysrltvdksrwqegnvfscsvmhealhnhytqkslslslgksggpGPAG |
| | | LYAQpgsaptssstkktqlqlehllldlqmilnginnyknpkltrmltfkfympkkatelkhlqcleeelkpleevlnlaqs |
| | | knfhlrprdlisninvivlelkgsettfmceyadetativeflnrwitfcqsiistltggggsggggsggggsggggsggggsg |
| | | gggssggpGPAGLYAQpgsEVQLVESGGGLVQPGGSLRLSCAASGFTFSSYTLAWVR |
| | | QAPGKGLEWVAAIDSSSYTYSPDTVRGRFTISRDNAKNSLYLQMNSLRAEDTAV |
| | | YYCARDSNWDALDYWGcGTTVTVSSGGGGSGGGGSGGGGSDIQMTQSPSSLSA |
| | | SVGDRVTITCKASQNVGTNVGWYQQKPGKcPKALIYSASFRYSGVPSRFSGSGS |
| | | GTDFTLTISSLQPEDFATYYCQQYYTYPYTFGGGTKVEIK** |
| 304 | ACP385 | eskygppcppcpapeflggpsvflfppkpkdtlmisrtpevtcvvvdvsqedpevqfnwyvdgvevhnaktkpreeqf |
| | | nstyrvvsvltvlhqdwlngkeykckvsnkglpssiektiskakgqprepqvytlppsqeemtknqvsltclvkgfypsdi |
| | | avewesngqpennykttppvldsdgsfflysrltvdksrwqegnvfscsvmhealhnhytqkslslslgksggpGPAG |
| | | LYAQpgsaptssstkktqlqlehllldlqmilnginnyknpkltrmltfkfympkkatelkhlqcleeelkpleevlnlaqs |
| | | knfhlrprdlisninvivlelkgsettfmceyadetativeflnrwitfcqsiistltggggsggggsggggsggggsggggsg |
| | | gggssggpGPAGLYAQpgsEVQLVESGGGLVQPGGSLRLSCAASGFTFSSYTLAWVR |
| | | QAPGKcLEWVAAIDSSSYTYSPDTVRGRFTISRDNAKNSLYLQMNSLRAEDTAV |
| | | YYCARDSNWDALDYWGQGTTVTVSSGGGGSGGGGSGGGGSDIQMTQSPSSLS |
| | | ASVGDRVTITCKAREKLW SAVAWYQQKPGKAPKALIYSASFRYSGVPSRFSGSG |
| | | SGTDFTLTISSLQPEDFATYYCQQYYTYPYTFGcGTKVEIK** |
| 305 | ACP386 | eskygppcppcpapeflggpsvflfppkpkdtlmisrtpevtcvvvdvsqedpevqfnwyvdgvevhnaktkpreeqf |
| | | nstyrvvsvltvlhqdwlngkeykckvsnkglpssiektiskakgqprepqvytlppsqeemtknqvsltclvkgfypsdi |
| | | avewesngqpennykttppvldsdgsfflysrltvdksrwqegnvfscsvmhealhnhytqkslslslgksggpGPAG |
| | | LYAQpgsaptssstkktqlqlehllldlqmilnginnyknpkltrmltfkfympkkatelkhlqcleeelkpleevlnlaqs |
| | | knfhlrprdlisninvivlelkgsettfmceyadetativeflnrwitfcqsiistltggggsggggsggggsggggsggggsg |
| | | gggssggpGPAGLYAQpgsEVQLVESGGGLVQPGGSLRLSCAASGFTFSSYTLAWVR |
| | | QAPGKGLEWVAAIDSSSYTYSPDTVRGRFTISRDNAKNSLYLQMNSLRAEDTAV |
| | | YYCARDSNWDALDYWGcGTTVTVSSGGGGSGGGGSGGGGSDIQMTQSPSSLSA |
| | | SVGDRVTITCKAREKLWSAVAWYQQKPGKcPKALIYSASFRYSGVPSRFSGSGS |
| | | GTDFTLTISSLQPEDFATYYCQQYYTYPYTFGGGTKVEIK** |
| 306 | ACP387 | eskygppcppcpapeflggpsvflfppkpkdtlmisrtpevtcvvvdvsqedpevqfnwyvdgvevhnaktkpreeqf |
| | | nstyrvvsvltvlhqdwlngkeykckvsnkglpssiektiskakgqprepqvytlppsqeemtknqvsltclvkgfypsdi |
| | | avewesngqpennykttppvldsdgsfflysrltvdksrwqegnvfscsvmhealhnhytqkslslslgksggpGPAG |
| | | LYAQpgsaptssstkktqlqlehllldlqmilnginnyknpkltrmltfkfympkkatelkhlqcleeelkpleevlnlaqs |
| | | knfhlrprdlisninvivlelkgsettfmceyadetativeflnrwitfcqsiistltggggsggggsggggsggggsggggsg |
| | | gggssggpGPAGLYAQpgsEVQLVESGGGLVQPGGSLRLSCAASGFTFSSYTLAWVR |
| | | QAPGKcLEWVAAIDSSSYTYSPDTVRGRFTISRDNAKNSLYLQMNSLRAEDTAV |
| | | YYCARDSNWDALDYWGQGTTVTVSSGGGGSGGGGSGGGGSDIQMTQSPSSLS |
| | | ASVGDRVTITCKVTEKVWGNVAWYQQKPGKAPISLIYSPSLRKSGVPSRFSGSGS |
| | | GTDFTLTISSLQPEDFATYYCQQYYTYPYTFGcGTKVEIK** |
| 307 | ACP388 | eskygppcppcpapeflggpsvflfppkpkdtlmisrtpevtcvvvdvsqedpevqfnwyvdgvevhnaktkpreeqf |
| | | nstyrvvsvltvlhqdwlngkeykckvsnkglpssiektiskakgqprepqvytlppsqeemtknqvsltclvkgfypsdi |
| | | avewesngqpennykttppvldsdgsfflysrltvdksrwqegnvfscsvmhealhnhytqkslslslgksggpGPAG |
| | | LYAQpgsaptssstkktqlqlehllldlqmilnginnyknpkltrmltfkfympkkatelkhlqcleeelkpleevlnlaqs |
| | | knfhlrprdlisninvivlelkgsettfmceyadetativeflnrwitfcqsiistltggggsggggsggggsggggsggggsg |
| | | gggssggpGPAGLYAQpgsEVQLVESGGGLVQPGGSLRLSCAASGFTFSSYTLAWVR |
| | | QAPGKGLEWVAAIDSSSYTYSPDTVRGRFTISRDNAKNSLYLQMNSLRAEDTAV |
| | | YYCARDSNWDALDYWGcGTTVTVSSGGGGSGGGGSGGGGSDIQMTQSPSSLSA |
| | | SVGDRVTITCKVTEKVWGNVAWYQQKPGKcPISLIYSPSLRKSGVPSRFSGSGSG |
| | | TDFTLTISSLQPEDFATYYCQQYYTYPYTFGGGTKVEIK** |
| 308 | ACP389 | eskygppcppcpapeflggpsvflfppkpkdtlmisrtpevtcyvvdvsqedpevqfnwyvdgvevhnaktkpreeqf |
| | | nstyrvvsvltvlhqdwlngkeykckvsnkglpssiektiskakgqprepqvytlppsqeemtknqvsltclvkgfypsdi |
| | | avewesngqpennykttppvldsdgsfflysrltvdksrwqegnvfscsvmhealhnhytqkslslslgksggpGPAG |
| | | LYAQpgsaptssstkktqlqlehllldlqmilnginnyknpkltrmltfkfympkkatelkhlqcleeelkpleevlnlaqs |
| | | knfhlrprdlisninvivlelkgsettfmceyadetativeflnrwitfcqsiistltggggsggggsggggsggggsggggsg |
| | | gggssggpGPAGLYAQpgsevqllesggglvqpggslrlscaasgsifsanamgwyrqapgkqrelvavissggst |
| | | nyadsvkgrftisrdnskntvylqmnslraedtavyycmysgsyyytpndywgqgtlvtvss** |
| 309 | ACP390 | aptssstkktqlqlehllldlqmilnginnyknpkltrmltfkfympkkatelkhlqcleeelkpleevlnlaqsknfhlrprdli |
| | | sninvivlelkgsettfmceyadetativeflnrwitfcqsiistltsggpGPAGLYAQpgsEVQLVESGGGLV |
| | | QPGNSLRLSCAASGFTFSKFGMSWVRQAPGKGLEWVSSISGSGRDTLYAESVKG |
| | | RFTISRDNAKTTLYLQMNSLRPEDTAVYYCTIGGSLSVSSQGTLVTVSSggggsgggg |
| | | sggggsggggsggggsggggssggpGPAGLYAQpgsEVQLVESGGGLVQPGGSLRLSCAAS |
| | | GFTFSSYTLAWVRQAPGKcLEWVAAIDSSSYTYSPDTVRGRFTISRDNAKNSLYL |
| | | QMNSLRAEDTAVYYCARDSNWDALDYWGQGTTVTVSSGGGGSGGGGSGGGG |
| | | SDIQMTQSPSSLSASVGDRVTITCKAREKLWSAVAWYQQKPGKAPKsLIYSASFR |
| | | YSGVPSRFSGSGSGTDFTLTISSLQPEDFATYYCQQYYTYPYTFGcGTKVEIK** |
| 310 | ACP391 | eskygppcppcpapeflggpsvflfppkpkdtlmisrtpevtcvvvdvsqedpevqfnwyvdgvevhnaktkpreeqf |
| | | nstyrvvsvltvlhqdwlngkeykckvsnkglpssiektiskakgqprepqvytlppsqeemtknqvsltclvkgfypsdi |
| | | avewesngqpennykttppvldsdgsfflysrltvdksrwqegnvfscsvmhealhnhytqkslslslgksggpGPAG |
| | | LYAQpgsaptssstkktqlqlehllldlqmilnginnyknpkltrmltfkfympkkatelkhlqcleeelkpleevlnlaqs |
| | | knfhlrprdlisninvivlelkgsettfmceyadetativeflnrwitfcqsiistltggggsggggsggggsggggsggggsg |
| | | gggssggpGPAGLYAQpgsEVQLVESGGGLVQPGGSLRLSCAASGFTFSSYTLAWVR |
| | | QAPGKcLEWVAAIDSSSYTYSPDTVRGRFTISRDNAKNSLYLQMNSLRAEDTAV |
| | | YYCARDSNWDALDYWGQGTTVTVSSGGGGSGGGGSGGGGSDIQMTQSPSSLS |
| | | ASVGDRVTITCKAREKLWSAVAWYQQKPGKAPKsLIYSASFRYSGVPSRFSGSG |
| | | SGTDFTLTISSLQPEDFATYYCQQYYTYPYTFGcGTKVEIK** |
| 311 | ACP392 | aptssstkktqlqlehllldlqmilnginnyknpkltrmltfkfympkkatelkhlqcleeelkpleevlnlaqsknfhlrprdli |
| | | sninvivlelkgsettfmceyadetativeflnrwitfcqsiistltsggpGPAGLYAQpgsggggsggggsggggsgg |
| | | ggsggggsggggselcdddppeiphatfkamaykegtmlnceckrgfrriksgslymlctgnsshsswdnqcqctssatr |
| | | nttkqvtpqpeeqkerkttemqspmqpvdqaslpghcrepppweneateriyhfvvgqmvyyqcvqgyralhrgpae |
| | | svckmthgktrwtqpqlictgemetsqfpgeekpqaspegrpesetsSlvtttdfqiqtemaatmetsiftteyqsggpGP |
| | | AGLYAQpgsEVQLVESGGGLVQPGNSLRLSCAASGFTFSKFGMSWVRQAPGKGL |
| | | EWVSSISGSGRDTLYAESVKGRFTISRDNAKTTLYLQMNSLRPEDTAVYYCTIGG |
| | | SLSVSSQGTLVTVSSggggsggggsggggsggggsggggsggggssggpGPAGLYAQpgsEVQL |
| | | VESGGGLVQPGGSLRLSCAASGFTFSSYTLAWVRQAPGKcLEWVAAIDSSSYTY |
| | | SPDTVRGRFTISRDNAKNSLYLQMNSLRAEDTAVYYCARDSNWDALDYWGQG |
| | | TTVTVSSGGGGSGGGGSGGGGSDIQMTQSPSSLSASVGDRVTITCKAREKLWSA |
| | | VAWYQQKPGKAPKsLIYSASFRYSGVPSRFSGSGSGTDFTLTISSLQPEDFATYYC |
| | | QQYYTYPYTFGcGTKVEIK** |
| 312 | ACP393 | aptssstkktqlqlehllldlqmilnginnyknpkltrmltfkfympkkatelkhlqcleeelkpleevlnlaqsknfhlrprdli |
| | | sninvivlelkgsettfmceyadetativeflnrwitfcqsiistltsggpGPAGLYAQpgsggggsggggsggggsgg |
| | | ggsggggsggggselcdddppeiphatfkamaykegtmlnceckrgfrriksgslymlctgnsshsswdnqcqctssatr |
| | | nttkqvtpqpeeqkerkttemqspmqpvdqaslpghcrepppweneateriyhfvvgqmvyyqcvqgyralhrgpae |
| | | svckmthgktrwtqpqlictgemetsqfpgeekpqaspegrpesetsSlvtttdfqiqtemaatmetsiftteyqsggpGP |
| | | AGLYAQpgsEVQLVESGGGLVQPGNSLRLSCAASGFTFSKFGMSWVRQAPGKGL |
| | | EWVSSISGSGRDTLYAESVKGRFTISRDNAKTTLYLQMNSLRPEDTAVYYCTIGG |
| | | SLSVSSQGTLVTVSSggggsggggsggggsggggsggggsggggssggpGPAGLYAQpgsEVQL |
| | | VESGGGLVQPGGSLRLSCAASGFTFSSYTLAWVRQAPGKGLEWVAAIDSSSYTY |
| | | SPDTVRGRFTISRDNAKNSLYLQMNSLRAEDTAVYYCARDSNWDALDYWGcGT |
| | | TVTVSSGGGGSGGGGSGGGGSDIQMTQSPSSLSASVGDRVTITCKAREKLWSAV |
| | | AWYQQKPGKcPKALIYSASFRYSGVPSRFSGSGSGTDFTLTISSLQPEDFATYYCQ |
| | | QYYTYPYTFGGGTKVEIK** |
| 313 | ACP394 | aptssstkktqlqlehllldlqmilnginnyknpkltrmltfkfympkkatelkhlqcleeelkpleevlnlaqsknfhlrprdli |
| | | sninvivlelkgsettfmceyadetativeflnrwitfcqsiistltsggpGPAGLYAQpgsggggsggggsggggsgg |
| | | ggsggggsggggselcdddppeiphatfkamaykegtmlnceckrgfrriksgslymlctgnsshsswdnqcqctssatr |
| | | nttkqvtpqpeeqkerkttemqspmqpvdqaslpghcrepppweneateriyhfvvgqmvyyqcvqgyralhrgpae |
| | | svckmthgktrwtqpqlictgemetsqfpgeekpqaspegrpesetsSlvtttdfqiqtemaatmetsiftteyqsggpGP |
| | | AGLYAQpgsEVQLVESGGGLVQPGNSLRLSCAASGFTFSKFGMSWVRQAPGKGL |
| | | EWVSSISGSGRDTLYAESVKGRFTISRDNAKTTLYLQMNSLRPEDTAVYYCTIGG |
| | | SLSVSSQGTLVTVSSggggsggggsggggsggggsggggsggggssggpGPAGLYAQpgsEVQL |
| | | VESGGGLVQPGGSLRLSCAASGFTFSSYTLAWVRQAPGKcLEWVAAIDSSSYTY |
| | | SPDTVRGRFTISRDNAKNSLYLQMNSLRAEDTAVYYCARDSNWDALDYWGQG |
| | | TTVTVSSGGGGSGGGGSGGGGSDIQMTQSPSSLSASVGDRVTITCKVTEKVWGN |
| | | VAWYQQKPGKAPISLIYSPSLRKSGVPSRFSGSGSGTDFTLTISSLQPEDFATYYC |
| | | QQYYTYPYTFGcGTKVEIK** |
| 314 | ACP395 | aptssstkktqlqlehllldlqmilnginnyknpkltrmltfkfympkkatelkhlqcleeelkpleevlnlaqsknfhlrprdli |
| | | sninvivlelkgsettfmceyadetativeflnrwitfcqsiistltsggpGPAGLYAQpgsggggsggggsggggsgg |
| | | ggsggggsggggselcdddppeiphatfkamaykegtmlnceckrgfrriksgslymlctgnsshsswdnqcqctssatr |
| | | nttkqvtpqpeeqkerkttemqspmqpvdqaslpghcrepppweneateriyhfvvgqmvyyqcvqgyralhrgpae |
| | | svckmthgktrwtqpqlictgemetsqfpgeekpqaspegrpesetsSlvtttdfqiqtemaatmetsiftteyqsggpGP |
| | | AGLYAQpgsEVQLVESGGGLVQPGNSLRLSCAASGFTFSKFGMSWVRQAPGKGL |
| | | EWVSSISGSGRDTLYAESVKGRFTISRDNAKTTLYLQMNSLRPEDTAVYYCTIGG |
| | | SLSVSSQGTLVTVSSggggsggggsggggsggggsggggsggggssggpGPAGLYAQpgsEVQL |
| | | VESGGGLVQPGGSLRLSCAASGFTFSSYTLAWVRQAPGKGLEWVAAIDSSSYTY |
| | | SPDTVRGRFTISRDNAKNSLYLQMNSLRAEDTAVYYCARDSNWDALDYWGcGT |
| | | TVTVSSGGGGSGGGGSGGGGSDIQMTQSPSSLSASVGDRVTITCKVTEKVWGNV |
| | | AWYQQKPGKcPISLIYSPSLRKSGVPSRFSGSGSGTDFTLTISSLQPEDFATYYCQQ |
| | | YYTYPYTFGGGTKVEIK** |
| 315 | ACP396 | aptssstkktqlqlehllldlqmilnginnyknpkltrmltfkfympkkatelkhlqcleeelkpleevlnlaqsknfhlrprdli |
| | | sninvivlelkgsettfmceyadetativeflnrwitfcqsiistltsggpGPAGLYAQpgsggggsggggsggggsgg |
| | | ggsggggsggggselcdddppeiphatfkamaykegtmlnceckrgfrriksgslymlctgnsshsswdnqcqctssatr |
| | | nttkqvtpqpeeqkerkttemqspmqpvdqaslpghcrepppweneateriyhfvvgqmvyyqcvqgyralhrgpae |
| | | svckmthgktrwtqpqlictgemetsqfpgeekpqaspegrpesetsSlvtttdfqiqtemaatmetsiftteyqsggpGP |
| | | AGLYAQpgsEVQLVESGGGLVQPGNSLRLSCAASGFTFSKFGMSWVRQAPGKGL |
| | | EWVSSISGSGRDTLYAESVKGRFTISRDNAKTTLYLQMNSLRPEDTAVYYCTIGG |
| | | SLSVSSQGTLVTVSSggggsggggsggggsggggsggggsggggssggpGPAGLYAQpgsevqlles |
| | | ggglvqpggslrlscaasgsifsanamgwyrqapgkqrelvavissggstnyadsvkgrftisrdnskntvylqmnslraed |
| | | tavyycmysgsyyytpndywgqgtlvtvss** |
| 316 | ACP397 | aptssstkktqlqlehllldlqmilnginnyknpkltrmltfkfympkkatelkhlqcleeelkpleevlnlaqsknfhlrprdli |
| | | sninvivlelkgsettfmceyadetativeflnrwitfcqsiistltsggpGPAGLYAQpgsggggsggggsggggsgg |
| | | ggsggggsggggselcdddppeiphatfkamaykegtmlnceckrgfrriksgslymlctgnsshsswdnqcqctssatr |
| | | nttkqvtpqpeeqkerkttemqspmqpvdqaslpghcrepppweneateriyhfvvgqmvyyqcvqgyralhrgpae |
| | | svckmthgktrwtqpqlictgemetsqfpgeekpqaspegrpesetsSlvtttdfqiqtemaatmetsiftteyqsggpGP |
| | | AGLYAQpgsEVQLVESGGGLVQPGNSLRLSCAASGFTFSKFGMSWVRQAPGKGL |
| | | EWVSSISGSGRDTLYAESVKGRFTISRDNAKTTLYLQMNSLRPEDTAVYYCTIGG |
| | | SLSVSSQGTLVTVSSggggsggggsggggsggggsggggsggggssggpGPAGLYAQpgsevqlles |
| | | ggglvqpggslrlscaasgsifsanamgwyrqapgkglelvavissggstnyadsvkgrftisrdnskntvylqmnslraed |
| | | tavyycmysgsyyytpndywgqgtlvtvss** |
| 317 | ACP398 | aptssstkktqlqlehllldlqmilnginnyknpkltrmltfkfympkkatelkhlqcleeelkpleevlnlaqsknfhlrprdli |
| | | sninvivlelkgsettfmceyadetativeflnrwitfcqsiistltsggpGPAGLYAQpgsggggsggggsggggsgg |
| | | ggsggggsggggselcdddppeiphatfkamaykegtmlnceckrgfrriksgslymlctgnsshsswdnqcqctssatr |
| | | nttkqvtpqpeeqkerkttemqspmqpvdqaslpghcrepppweneateriyhfvvgqmvyyqcvqgyralhrgpae |
| | | svckmthgktrwtqpqlictgemetsqfpgeekpqaspegrpesetsSlvtttdfqiqtemaatmetsiftteyqsggpGP |
| | | AGLYAQpgsEVQLVESGGGLVQPGNSLRLSCAASGFTFSKFGMSWVRQAPGKGL |
| | | EWVSSISGSGRDTLYAESVKGRFTISRDNAKTTLYLQMNSLRPEDTAVYYCTIGG |
| | | SLSVSSQGTLVTVSSggggsggggsggggsggggsggggsggggssggpGPAGLYAQpgsEVQL |
| | | VESGGGLVQPGGSLRLSCAASGFTFSSYTLAWVRQAPGKGLEWVAAIDSSSYTY |
| | | SPDTVRGRFTISRDNAKNSLYLQMNSLRAEDTAVYYCARDSNWDALDYWGQG |
| | | TTVTVSSastkgpsvfplapsskstsggtaalgclvkdyfpepvtvswnsgaltsgvhtfpavlqssglyslssvvtvpss |
| | | slgtqtyicnvnhkpsntkvdkrvepksc** |
| 318 | ACP399 | EVQLVESGGGLVQPGGSLRLSCAASGFTFSSYTLAWVRQAPGKcLEWVAAIDSS |
| | | SYTYSPDTVRGRFTISRDNAKNSLYLQMNSLRAEDTAVYYCARDSNWDALDYW |
| | | GQGTTVTVSSGGGGSGGGGSGGGGSDIQMTQSPSSLSASVGDRVTITCKAREKL |
| | | WSAVAWYQQKPGKAPKsLIYSASFRYSGVPSRFSGSGSGTDFTLTISSLQPEDFAT |
| | | YYCQQYYTYPYTFGcGTKVEIKsggpGPAGLYAQpgsggggsggggsggggsggggsggggsg |
| | | gggsEVQLVESGGGLVQPGNSLRLSCAASGFTFSKFGMSWVRQAPGKGLEWVSSI |
| | | SGSGRDTLYAESVKGRFTISRDNAKTTLYLQMNSLRPEDTAVYYCTIGGSLSVSS |
| | | QGTLVTVSSsggpGPAGLYAQpgstfkfympkkatelkhlqcleeelkpleevlnlaqsknfhlrprdlisnin |
| | | vivlelkgsettfmceyadetativeflnrwitfcqsiistltGGssstkktqlqlehllldlqmilnginnyknpkltrmlsggp |
| | | GPAGLYAQpgsEVQLVESGGGLVQPGNSLRLSCAASGFTFSKFGMSWVRQAPGK |
| | | GLEWVSSISGSGRDTLYAESVKGRFTISRDNAKTTLYLQMNSLRPEDTAVYYCTI |
| | | GGSLSVSSQGTLVTVSS** |
| 319 | ACP400 | EVQLVESGGGLVQPGGSLRLSCAASGFTFSSYTLAWVRQAPGKGLEWVAAIDSS |
| | | SYTYSPDTVRGRFTISRDNAKNSLYLQMNSLRAEDTAVYYCARDSNWDALDYW |
| | | GcGTTVTVSSGGGGSGGGGSGGGGSDIQMTQSPSSLSASVGDRVTITCKAREKL |
| | | WSAVAWYQQKPGKcPKALIYSASFRYSGVPSRFSGSGSGTDFTLTISSLQPEDFA |
| | | TYYCQQYYTYPYTFGGGTKVEIKsggpGPAGLYAQpgsggggsggggsggggsggggsgggg |
| | | sggggsEVQLVESGGGLVQPGNSLRLSCAASGFTFSKFGMSWVRQAPGKGLEWVS |
| | | SISGSGRDTLYAESVKGRFTISRDNAKTTLYLQMNSLRPEDTAVYYCTIGGSLSV |
| | | SSQGTLVTVSSsggpGPAGLYAQpgstfkfympkkatelkhlqcleeelkpleevlnlaqsknfhlrprdlisn |
| | | invivlelkgsettfmceyadetativeflnrwitfcqsiistltGGssstkktqlqlehllldlqmilnginnyknpkltrmlsg |
| | | gpGPAGLYAQpgsEVQLVESGGGLVQPGNSLRLSCAASGFTFSKFGMSWVRQAP |
| | | GKGLEWVSSISGSGRDTLYAESVKGRFTISRDNAKTTLYLQMNSLRPEDTAVYY |
| | | CTIGGSLSVSSQGTLVTVSS** |
| 320 | ACP401 | EVQLVESGGGLVQPGGSLRLSCAASGFTFSSYTLAWVRQAPGKcLEWVAAIDSS |
| | | SYTYSPDTVRGRFTISRDNAKNSLYLQMNSLRAEDTAVYYCARDSNWDALDYW |
| | | GQGTTVTVSSGGGGSGGGGSGGGGSDIQMTQSPSSLSASVGDRVTITCKVTEKV |
| | | WGNVAWYQQKPGKAPISLIYSPSLRKSGVPSRFSGSGSGTDFTLTISSLQPEDFAT |
| | | YYCQQYYTYPYTFGcGTKVEIKsggpGPAGLYAQpgsggggsggggsggggsggggsggggsg |
| | | gggsEVQLVESGGGLVQPGNSLRLSCAASGFTFSKFGMSWVRQAPGKGLEWVSSI |
| | | SGSGRDTLYAESVKGRFTISRDNAKTTLYLQMNSLRPEDTAVYYCTIGGSLSVSS |
| | | QGTLVTVSSsggpGPAGLYAQpgstfkfympkkatelkhlqcleeelkpleevlnlaqsknfhlrprdlisnin |
| | | vivlelkgsettfmceyadetativeflnrwitfcqsiistltGGssstkktqlqlehllldlqmilnginnyknpkhrmlsggp |
| | | GPAGLYAQpgsEVQLVESGGGLVQPGNSLRLSCAASGFTFSKFGMSWVRQAPGK |
| | | GLEWVSSISGSGRDTLYAESVKGRFTISRDNAKTTLYLQMNSLRPEDTAVYYCTI |
| | | GGSLSVSSQGTLVTVSS** |
| 321 | ACP402 | EVQLVESGGGLVQPGGSLRLSCAASGFTFSSYTLAWVRQAPGKGLEWVAAIDSS |
| | | SYTYSPDTVRGRFTISRDNAKNSLYLQMNSLRAEDTAVYYCARDSNWDALDYW |
| | | GcGTTVTVSSGGGGSGGGGSGGGGSDIQMTQSPSSLSASVGDRVTITCKVTEKV |
| | | WGNVAWYQQKPGKcPISLIYSPSLRKSGVPSRFSGSGSGTDFTLTISSLQPEDFAT |
| | | YYCQQYYTYPYTFGGGTKVEIKsggpGPAGLYAQpgsggggsggggsggggsggggsggggs |
| | | ggggsEVQLVESGGGLVQPGNSLRLSCAASGFTFSKFGMSWVRQAPGKGLEWVSS |
| | | ISGSGRDTLYAESVKGRFTISRDNAKTTLYLQMNSLRPEDTAVYYCTIGGSLSVS |
| | | SQGTLVTVSSsggpGPAGLYAQpgstfkfympkkatelkhlqcleeelkpleevlnlaqsknfhlrprdlisni |
| | | nvivlelkgsettfmceyadetativeflnrwitfcqsiistltGGssstkktqlqlehllldlqmilnginnyknpkltrmlsgg |
| | | pGPAGLYAQpgsEVQLVESGGGLVQPGNSLRLSCAASGFTFSKFGMSWVRQAPG |
| | | KGLEWVSSISGSGRDTLYAESVKGRFTISRDNAKTTLYLQMNSLRPEDTAVYYC |
| | | TIGGSLSVSSQGTLVTVSS** |
| 322 | ACP403 | evqllesggglvqpggslrlscaasgsifsanamgwyrqapgkqrelvavissggstnyadsvkgrftisrdnskntvylqm |
| | | nslraedtavyycmysgsyyytpndywgqgtlvtvsssggpGPAGLYAQpgsggggsggggsggggsggggsg |
| | | gggsggggsEVQLVESGGGLVQPGNSLRLSCAASGFTFSKFGMSWVRQAPGKGLE |
| | | WVSSISGSGRDTLYAESVKGRFTISRDNAKTTLYLQMNSLRPEDTAVYYCTIGGS |
| | | LSVSSQGTLVTVSSsggpGPAGLYAQpgstfkfympkkatelkhlqcleeelkpleevlnlaqsknfhlrpr |
| | | dlisninvivlelkgsettfmceyadetativeflnrwitfcqsiistltGGssstkktqlqlehllldlqmilnginnyknpkltr |
| | | mlsggpGPAGLYAQpgsEVQLVESGGGLVQPGNSLRLSCAASGFTFSKFGMSWVRQ |
| | | APGKGLEWVSSISGSGRDTLYAESVKGRFTISRDNAKTTLYLQMNSLRPEDTAV |
| | | YYCTIGGSLSVSSQGTLVTVSS** |
| 323 | ACP404 | evqllesggglvqpggslrlscaasgsifsanamgwyrqapgkglelvavissggstnyadsvkgrftisrdnskntvylqm |
| | | nslraedtavyycmysgsyyytpndywgqgtlvtvsssggpGPAGLYAQpgsggggsggggsggggsggggsg |
| | | gggsggggsEVQLVESGGGLVQPGNSLRLSCAASGFTFSKFGMSWVRQAPGKGLE |
| | | WVSSISGSGRDTLYAESVKGRFTISRDNAKTTLYLQMNSLRPEDTAVYYCTIGGS |
| | | LSVSSQGTLVTVSSsggpGPAGLYAQpgstfkfympkkatelkhlqcleeelkpleevlnlaqsknfhlrpr |
| | | dlisninvivlelkgsettfmceyadetativeflnrwitfcqsiistltGGssstkktqlqlehllldlqmilnginnyknpkltr |
| | | mlsggpGPAGLYAQpgsEVQLVESGGGLVQPGNSLRLSCAASGFTFSKFGMSWVRQ |
| | | APGKGLEWVSSISGSGRDTLYAESVKGRFTISRDNAKTTLYLQMNSLRPEDTAV |
| | | YYCTIGGSLSVSSQGTLVTVSS** |
| 324 | ACP405 | EVQLVESGGGLVQPGGSLRLSCAASGFTFSSYTLAWVRQAPGKGLEWVAAIDSS |
| | | SYTYSPDTVRGRFTISRDNAKNSLYLQMNSLRAEDTAVYYCARDSNWDALDYW |
| | | GQGTTVTVSSastkgpsvfplapsskstsggtaalgclvkdyfpepvtvswnsgaltsgvhtfpavlqssglyslssv |
| | | vtvpssslgtqtyicnvnhkpsntkvdkrvepkscsggpGPAGLYAQpgsggggsggggsggggsggggsgggg |
| | | sggggsEVQLVESGGGLVQPGNSLRLSCAASGFTFSKFGMSWVRQAPGKGLEWVS |
| | | SISGSGRDTLYAESVKGRFTISRDNAKTTLYLQMNSLRPEDTAVYYCTIGGSLSV |
| | | SSQGTLVTVSSsggpGPAGLYAQpgstfkfympkkatelkhlqcleeelkpleevlnlaqsknfhlrprdlisn |
| | | invivlelkgsettfmceyadetativeflnrwitfcqsiistltGGssstkktqlqlehllldlqmilnginnyknpkltrmlsg |
| | | gpGPAGLYAQpgsEVQLVESGGGLVQPGNSLRLSCAASGFTFSKFGMSWVRQAP |
| | | GKGLEWVSSISGSGRDTLYAESVKGRFTISRDNAKTTLYLQMNSLRPEDTAVYY |
| | | CTIGGSLSVSSQGTLVTVSS** |
| 325 | ACP406 | vprdcgckpcictvpevssvfifppkpkdvltitltpkvtcvvvdiskddpevqfswfvddvevhtaqtqpreeqfnstfrsv |
| | | selpimhqdwlngkefkcrvnsaafpapiektisktkgrpkapqvytipppkeqmakdkvsltcmitdffpeditvewq |
| | | wngqpaenykntqpimdtdgsyfvysklnvqksnweagntftcsvlheglhnhhtekslshspgksggpGPAGLY |
| | | AQpgsaptssstkktqlqlehllldlqmilnginnyknpkltrmltfkfympkkatelkhlqcleeelkpleevlnlaqsknf |
| | | hlrprdlisninvivlelkgsettfmceyadetativeflnrwitfcqsiistltggggsggggsggggsggggsggggsgggg |
| | | ssggpGPAGLYAQpgsEVQLVESGGGLVQPGGSLRLSCAASGFTFSSYTLAWVRQA |
| | | PGKGLEWVAAIDSSSYTYSPDTVRGRFTISRDNAKNSLYLQMNSLRAEDTAVYY |
| | | CARDSNWDALDYWGQGTTVTVSSastkgpsvfplapsskstsggtaalgclvkdyfpepvtvswnsgal |
| | | tsgvhtfpavlqssglyslssvvtvpssslgtqtyicnvnhkpsntkvdkrvepksc** |
| 326 | ACP407 | vprdcgckpcictvpevssvfifppkpkdvltitltpkvtcvvvdiskddpevqfswfvddvevhtaqtqpreeqfnstfrsv |
| | | selpimhqdwlngkefkcrvnsaafpapiektisktkgrpkapqvytipppkeqmakdkvsltcmitdffpeditvewq |
| | | wngqpaenykntqpimdtdgsyfvysklnvqksnweagntftcsvlheglhnhhtekslshspgksggpGPAGLY |
| | | AQpgsaptssstkktqlqlehllldlqmilnginnyknpkltrmltfkfympkkatelkhlqcleeelkpleevlnlaqsknf |
| | | hlrprdlisninvivlelkgsettfmceyadetativeflnrwitfcqsiistltggggsggggsggggsggggsggggsgggg |
| | | ssggpGPAGLYAQpgsEVQLVESGGGLVQPGGSLRLSCAASGFTFSSYTLAWVRQA |
| | | PGKcLEWVAAIDSSSYTYSPDTVRGRFTISRDNAKNSLYLQMNSLRAEDTAVYY |
| | | CARDSNWDALDYWGQGTTVTVSSGGGGSGGGGSGGGGSDIQMTQSPSSLSASV |
| | | GDRVTITCKAREKLWSAVAWYQQKPGKAPKALIYSASFRYSGVPSRFSGSGSGT |
| | | DFTLTISSLQPEDFATYYCQQYYTYPYTFGcGTKVEIK** |
| 327 | ACP408 | vprdcgckpcictvpevssvfifppkpkdvltitltpkvtcvvvdiskddpevqfswfvddvevhtaqtqpreeqfnstfrsv |
| | | selpimhqdwlngkefkcrvnsaafpapiektisktkgrpkapqvytipppkeqmakdkvsltcmitdffpeditvewq |
| | | wngqpaenykntqpimdtdgsyfvysklnvqksnweagntftcsvlheglhnhhtekslshspgksggpGPAGLY |
| | | AQpgsaptssstkktqlqlehllldlqmilnginnyknpkltrmltfkfympkkatelkhlqcleeelkpleevlnlaqsknf |
| | | hlrprdlisninvivlelkgsettfmceyadetativeflnrwitfcqsiistltggggsggggsggggsggggsggggsgggg |
| | | ssggpGPAGLYAQpgsEVQLVESGGGLVQPGGSLRLSCAASGFTFSSYTLAWVRQA |
| | | PGKcLEWVAAIDSSSYTYSPDTVRGRFTISRDNAKNSLYLQMNSLRAEDTAVYY |
| | | CARDSNWDALDYWGQGTTVTVSSGGGGSGGGGSGGGGSDIQMTQSPSSLSASV |
| | | GDRVTITCKAREKLWSAVAWYQQKPGKAPKsLIYSASFRYSGVPSRFSGSGSGT |
| | | DFTLTISSLQPEDFATYYCQQYYTYPYTFGcGTKVEIK** |
| 328 | ACP409 | vprdcgckpcictvpevssvfifppkpkdvltitltpkvtcvvvdiskddpevqfswfvddvevhtaqtqpreeqfnstfrsv |
| | | selpimhqdwlngkefkcrvnsaafpapiektisktkgrpkapqvytipppkeqmakdkvsltcmitdffpeditvewq |
| | | wngqpaenykntqpimdtdgsyfvysklnyqksnweagntftcsvlheglhnhhtekslshspgksggpGPAGLY |
| | | AQpgsaptssstkktqlqlehllldlqmilnginnyknpkltrmltfkfympkkatelkhlqcleeelkpleevlnlaqsknf |
| | | hlrprdlisninvivlelkgsettfmceyadetativeflnrwitfcqsiistltggggsggggsggggsggggsggggsgggg |
| | | ssggpGPAGLYAQpgsEVQLVESGGGLVQPGGSLRLSCAASGFTFSSYTLAWVRQA |
| | | PGKGLEWVAAIDSSSYTYSPDTVRGRFTISRDNAKNSLYLQMNSLRAEDTAVYY |
| | | CARDSNWDALDYWGcGTTVTVSSGGGGSGGGGSGGGGSDIQMTQSPSSLSASV |
| | | GDRVTITCKAREKLWSAVAWYQQKPGKcPKALIYSASFRYSGVPSRFSGSGSGT |
| | | DFTLTISSLQPEDFATYYCQQYYTYPYTFGGGTKVEIK** |
| 329 | ACP410 | vprdcgckpcictvpevssvfifppkpkdvltitltpkvtcvvvdiskddpevqfswfvddvevhtaqtqpreeqfnstfrsv |
| | | selpimhqdwlngkefkcrvnsaafpapiektisktkgrpkapqvytipppkeqmakdkvsltcmitdffpeditvewq |
| | | wngqpaenykntqpimdtdgsyfvysklnvqksnweagntftcsvlheglhnhhtekslshspgksggpGPAGLY |
| | | AQpgsaptssstkktqlqlehllldlqmilnginnyknpkltrmltfkfympkkatelkhlqcleeelkpleevlnlaqsknf |
| | | hlrprdlisninvivlelkgsettfmceyadetativeflnrwitfcqsiistltggggsggggsggggsggggsggggsgggg |
| | | ssggpGPAGLYAQpgsEVQLVESGGGLVQPGGSLRLSCAASGFTFSSYTLAWVRQA |
| | | PGKcLEWVAAIDSSSYTYSPDTVRGRFTISRDNAKNSLYLQMNSLRAEDTAVYY |
| | | CARDSNWDALDYWGQGTTVTVSSGGGGSGGGGSGGGGSDIQMTQSPSSLSASV |
| | | GDRVTITCKVTEKVWGNVAWYQQKPGKAPISLIYSPSLRKSGVPSRFSGSGSGT |
| | | DFTLTISSLQPEDFATYYCQQYYTYPYTFGcGTKVEIK** |
| 330 | ACP411 | vprdcgckpcictvpevssvfifppkpkdvltitltpkvtcvvvdiskddpevqfswfvddvevhtaqtqpreeqfnstfrsv |
| | | selpimhqdwlngkefkcrvnsaafpapiektisktkgrpkapqvytipppkeqmakdkvsltcmitdffpeditvewq |
| | | wngqpaenykntqpimdtdgsyfvysklnvqksnweagntftcsvlheglhnhhtekslshspgksggpGPAGLY |
| | | AQpgsaptssstkktqlqlehllldlqmilnginnyknpkltrmltfkfympkkatelkhlqcleeelkpleevlnlaqsknf |
| | | hlrprdlisninvivlelkgsettfmceyadetativeflnrwitfcqsiistltggggsggggsggggsggggsggggsgggg |
| | | ssggpGPAGLYAQpgsEVQLVESGGGLVQPGGSLRLSCAASGFTFSSYTLAWVRQA |
| | | PGKGLEWVAAIDSSSYTYSPDTVRGRFTISRDNAKNSLYLQMNSLRAEDTAVYY |
| | | CARDSNWDALDYWGcGTTVTVSSGGGGSGGGGSGGGGSDIQMTQSPSSLSASV |
| | | GDRVTITCKVTEKVWGNVAWYQQKPGKcPISLIYSPSLRKSGVPSRFSGSGSGTD |
| | | FTLTISSLQPEDFATYYCQQYYTYPYTFGGGTKVEIK** |
| 331 | ACP412 | vprdcgckpcictvpevssvfifppkpkdvltitltpkvtcvvvdiskddpevqfswfvddvevhtaqtqpreeqfnstfrsv |
| | | selpimhqdwlngkefkcrvnsaafpapiektisktkgrpkapqvytipppkeqmakdkvsltcmitdffpeditvewq |
| | | wngqpaenykntqpimdtdgsyfvysklnyqksnweagntftcsvlheglhnhhtekslshspgksggpGPAGLY |
| | | AQpgsaptssstkktqlqlehllldlqmilnginnyknpkltrmltfkfympkkatelkhlqcleeelkpleevlnlaqsknf |
| | | hlrprdlisninvivlelkgsettfmceyadetativeflnrwitfcqsiistltggggsggggsggggsggggsggggsgggg |
| | | ssggpGPAGLYAQpgsevqllesggglvqpggslrlscaasgsifsanamgwyrqapgkqrelvavissggstnya |
| | | dsvkgrftisrdnskntvylqmnslraedtavyycmysgsyyytpndywgqgtlvtvss** |
| 332 | ACP413 | elcdddppeiphatfkamaykegtmlnceckrgfrriksgslymlctgnsshsswdnqcqctssatrnttkqvtpqpeeqk |
| | | erkttemqspmqpvdqaslpghcrepppweneateriyhfvvgqmvyyqcvqgyralhrgpaesvckmthgktrwtq |
| | | pqlictgemetsqfpgeekpqaspegrpesetsSlvtttdfqiqtemaatmetsiftteyqggggsggggsggggsggggs |
| | | ggggsggggsDIQMTQSPSSLSASVGDRVTITCKAREKLWSAVAWYQQKPGKAPKsL |
| | | IYSASFRYSGVPSRFSGSGSGTDFTLTISSLQPEDFATYYCQQYYTYPYTFGGGTK |
| | | VEIKrtvaapsyfifppsdeqlksgtasvvcllnnfypreakvqwkydnalqsgnsqesvteqdskdstyslsstltlskad |
| | | yekhkvyacevthqglsspvtksfnrgec** |
| 333 | ACP414 | elcdddppeiphatfkamaykegtmlnceckrgfrriksgslymlctgnsshsswdnqcqctssatmttkqvtpqpeeqk |
| | | erkttemqspmqpvdqaslpghcrepppweneateriyhfvvgqmvyyqcvqgyralhrgpaesyckmthgktrwtq |
| | | pqlictgemetsqfpgeekpqaspegrpesetsSlvtttdfqiqtemaatmetsiftteyqggggsggggsggggsggggs |
| | | ggggsggggsDIQMTQSPSSLSASVGDRVTITCKVTEKVWGNVAWYQQKPGKAPISL |
| | | IYSPSLRKSGVPSRFSGSGSGTDFTLTISSLQPEDFATYYCQQYYTYPYTFGGGTK |
| | | VEIKrtvaapsyfifppsdeqlksgtasvvcllnnfypreakvqwkydnalqsgnsqesvteqdskdstyslsstltlskad |
| | | yekhkvyacevthqglsspvtksfnrgec** |
| 334 | ACP415 | aptssstkktqlqlehllldlqmilnginnyknpkltrmltfkfympkkatelkhlqcleeelkpleevlnlaqsknfhlrprdli |
| | | sninvivlelkgsettfmceyadetativeflnrwitfcqsiistltsggpGPAGLYAQpgsggggsggggsggggsgg |
| | | ggsggggsggggsEVQLVESGGGLVQPGGSLRLSCAASGFTFSSYTLAWVRQAPGKcL |
| | | EWVAAIDSSSYTYSPDTVRGRFTISRDNAKNSLYLQMNSLRAEDTAVYYCARDS |
| | | NWDALDYWGQGTTVTVSSGGGGSGGGGSGGGGSDIQMTQSPSSLSASVGDRVT |
| | | ITCKAREKLWSAVAWYQQKPGKAPKsLIYSASFRYSGVPSRFSGSGSGTDFTLTIS |
| | | SLQPEDFATYYCQQYYTYPYTFGcGTKVEIKggggsggggsggggsggggsggggsggggsgg |
| | | ggsggggsggggselcdddppeiphatfkamaykegtmlnceckrgfrriksgslymlctgnsshsswdnqcqctssatr |
| | | nttkqvtpqpeeqkerkttemqspmqpvdqaslpghcrepppweneateriyhfvvgqmvyyqcvqgyralhrgpae |
| | | svckmthgktrwtqpqlictgemetsqfpgeekpqaspegrpesetsSlvtttdfqiqtemaatmetsiftteyqsggpGP |
| | | AGLYAQpgsEVQLVESGGGLVQPGNSLRLSCAASGFTFSKFGMSWVRQAPGKGL |
| | | EWVSSISGSGRDTLYAESVKGRFTISRDNAKTTLYLQMNSLRPEDTAVYYCTIGG |
| | | SLSVSSQGTLVTVSS** |
| 335 | ACP416 | aptssstkktqlqlehllldlqmilnginnyknpkltrmltfkfympkkatelkhlqcleeelkpleevlnlaqsknfhlrprdli |
| | | sninvivlelkgsettfmceyadetativeflnrwitfcqsiistltsggpGPAGLYAQpgsggggsggggsggggsgg |
| | | ggsggggsggggsEVQLVESGGGLVQPGGSLRLSCAASGFTFSSYTLAWVRQAPGKG |
| | | LEWVAAIDSSSYTYSPDTVRGRFTISRDNAKNSLYLQMNSLRAEDTAVYYCARD |
| | | SNWDALDYWGcGTTVTVSSGGGGSGGGGSGGGGSDIQMTQSPSSLSASVGDRV |
| | | TITCKAREKLWSAVAWYQQKPGKcPKALIYSASFRYSGVPSRFSGSGSGTDFTLT |
| | | ISSLQPEDFATYYCQQYYTYPYTFGGGTKVEIKggggsggggsggggsggggsggggsggggs |
| | | ggggsggggsggggselcdddppeiphatfkamaykegtmlnceckrgfrriksgslymlctgnsshsswdnqcqctss |
| | | atrnttkqvtpqpeeqkerkttemqspmqpvdqaslpghcrepppweneateriyhfvvgqmvyyqcvqgyralhrgp |
| | | aesvckmthgktrwtqpqlictgemetsqfpgeekpqaspegrpesetsSlvtttdfqiqtemaatmetsiftteyqsggpG |
| | | PAGLYAQpgsEVQLVESGGGLVQPGNSLRLSCAASGFTFSKFGMSWVRQAPGKG |
| | | LEWVSSISGSGRDTLYAESVKGRFTISRDNAKTTLYLQMNSLRPEDTAVYYCTIG |
| | | GSLSVSSQGTLVTVSS** |
| 336 | ACP417 | aptssstkktqlqlehllldlqmilnginnyknpkltrmltfkfympkkatelkhlqcleeelkpleevlnlaqsknfhlrprdli |
| | | sninvivlelkgsettfmceyadetativeflnrwitfcqsiistltsggpGPAGLYAQpgsggggsggggsggggsgg |
| | | ggsggggsggggsEVQLVESGGGLVQPGGSLRLSCAASGFTFSSYTLAWVRQAPGKcL |
| | | EWVAAIDSSSYTYSPDTVRGRFTISRDNAKNSLYLQMNSLRAEDTAVYYCARDS |
| | | NWDALDYWGQGTTVTVSSGGGGSGGGGSGGGGSDIQMTQSPSSLSASVGDRVT |
| | | ITCKVTEKVWGNVAWYQQKPGKAPISLIYSPSLRKSGVPSRFSGSGSGTDFTLTIS |
| | | SLQPEDFATYYCQQYYTYPYTFGcGTKVEIKggggsggggsggggsggggsggggsggggsgg |
| | | ggsggggsggggselcdddppeiphatfkamaykegtmlnceckrgfrriksgslymlctgnsshsswdnqcqctssatr |
| | | nttkqvtpqpeeqkerkttemqspmqpvdqaslpghcrepppweneateriyhfvvgqmvyyqcvqgyralhrgpae |
| | | svckmthgktrwtqpqlictgemetsqfpgeekpqaspegrpesetsSlvtttdfqiqtemaatmetsiftteyqsggpGP |
| | | AGLYAQpgsEVQLVESGGGLVQPGNSLRLSCAASGFTFSKFGMSWVRQAPGKGL |
| | | EWVSSISGSGRDTLYAESVKGRFTISRDNAKTTLYLQMNSLRPEDTAVYYCTIGG |
| | | SLSVSSQGTLVTVSS** |
| 337 | ACP418 | aptssstkktqlqlehllldlqmilnginnyknpkltrmltfkfympkkatelkhlqcleeelkpleevlnlaqsknfhlrprdli |
| | | sninvivlelkgsettfmceyadetativeflnrwitfcqsiistltsggpGPAGLYAQpgsggggsggggsggggsgg |
| | | ggsggggsggggsEVQLVESGGGLVQPGGSLRLSCAASGFTFSSYTLAWVRQAPGKG |
| | | LEWVAAIDSSSYTYSPDTVRGRFTISRDNAKNSLYLQMNSLRAEDTAVYYCARD |
| | | SNWDALDYWGcGTTVTVSSGGGGSGGGGSGGGGSDIQMTQSPSSLSASVGDRV |
| | | TITCKVTEKVWGNVAWYQQKPGKcPISLIYSPSLRKSGVPSRFSGSGSGTDFTLTI |
| | | SSLQPEDFATYYCQQYYTYPYTFGGGTKVEIKggggsggggsggggsggggsggggsggggsg |
| | | gggsggggsggggselcdddppeiphatfkamaykegtmlnceckrgfrriksgslymlctgnsshsswdnqcqctssat |
| | | rnttkqvtpqpeeqkerkttemqspmqpvdqaslpghcrepppweneateriyhfvvgqmvyyqcvqgyralhrgpae |
| | | svckmthgktrwtqpqlictgemetsqfpgeekpqaspegrpesetsSlvtttdfqiqtemaatmetsiftteyqsggpGP |
| | | AGLYAQpgsEVQLVESGGGLVQPGNSLRLSCAASGFTFSKFGMSWVRQAPGKGL |
| | | EWVSSISGSGRDTLYAESVKGRFTISRDNAKTTLYLQMNSLRPEDTAVYYCTIGG |
| | | SLSVSSQGTLVTVSS** |
| 338 | ACP419 | aptssstkktqlqlehllldlqmilnginnyknpkltrmltfkfympkkatelkhlqcleeelkpleevlnlaqsknfhlrprdli |
| | | sninvivlelkgsettfmceyadetativeflnrwitfcqsiistltsggpGPAGLYAQpgsggggsggggsggggsgg |
| | | ggsggggsggggsevqllesggglvqpggslrlscaasgsifsanamgwyrqapgkqrelvavissggstnyadsvkgrft |
| | | isrdnskntvylqmnslraedtavyycmysgsyyytpndywgqgtlvtvssggggsggggsggggsggggsggggsg |
| | | gggsggggsggggsggggselcdddppeiphatfkamaykegtmlnceckrgfrriksgslymlctgnsshsswdnqc |
| | | qctssatrnttkqvtpqpeeqkerkttemqspmqpvdqaslpghcrepppweneateriyhfvvgqmvyyqcvqgyral |
| | | hrgpaesvckmthgktrwtqpqlictgemetsqfpgeekpqaspegrpesetsSlvtttdfqiqtemaatmetsiftteyqs |
| | | ggpGPAGLYAQpgsEVQLVESGGGLVQPGNSLRLSCAASGFTFSKFGMSWVRQAP |
| | | GKGLEWVSSISGSGRDTLYAESVKGRFTISRDNAKTTLYLQMNSLRPEDTAVYY |
| | | CTIGGSLSVSSQGTLVTVSS** |
| 339 | ACP420 | aptssstkktqlqlehllldlqmilnginnyknpkltrmltfkfympkkatelkhlqcleeelkpleevlnlaqsknfhlrprdli |
| | | sninvivlelkgsettfmceyadetativeflnrwitfcqsiistltsggpGPAGLYAQpgsggggsggggsggggsgg |
| | | ggsggggsggggsevqllesggglvqpggslrlscaasgsifsanamgwyrqapgkglelvavissggstnyadsvkgrft |
| | | isrdnskntvylqmnslraedtavyycmysgsyyytpndywgqgtlvtvssggggsggggsggggsggggsggggsg |
| | | gggsggggsggggsggggselcdddppeiphatfkamaykegtmlnceckrgfrriksgslymlctgnsshsswdnqc |
| | | qctssatrnttkqvtpqpeeqkerkttemqspmqpvdqaslpghcrepppweneateriyhfvvgqmvyyqcvqgyral |
| | | hrgpaesvckmthgktrwtqpqlictgemetsqfpgeekpqaspegrpesetsSlvtttdfqiqtemaatmetsiftteyqs |
| | | ggpGPAGLYAQpgsEVQLVESGGGLVQPGNSLRLSCAASGFTFSKFGMSWVRQAP |
| | | GKGLEWVSSISGSGRDTLYAESVKGRFTISRDNAKTTLYLQMNSLRPEDTAVYY |
| | | CTIGGSLSVSSQGTLVTVSS** |
| 340 | ACP421 | EVQLVESGGGLVQPGNSLRLSCAASGFTFSKFGMSWVRQAPGKGLEWVSSISGS |
| | | GRDTLYAESVKGRFTISRDNAKTTLYLQMNSLRPEDTAVYYCTIGGSLSVSSQGT |
| | | LVTVSSsggpGPAGLYAQpgsEVQLVESGGGLVQPGGSLRLSCAASGFTFSSYTLA |
| | | WVRQAPGKcLEWVAAIDSSSYTYSPDTVRGRFTISRDNAKNSLYLQMNSLRAED |
| | | TAVYYCARDSNWDALDYWGQGTTVTVSSGGGGSGGGGSGGGGSDIQMTQSPS |
| | | SLSASVGDRVTITCKAREKLWSAVAWYQQKPGKAPKsLIYSASFRYSGVPSRFSG |
| | | SGSGTDFTLTISSLQPEDFATYYCQQYYTYPYTFGcGTKVEIKggggsggggsggggsgg |
| | | ggsggggsggggsggggsggggsggggselcdddppeiphatfkamaykegtmlnceckrgfrriksgslymlctgnss |
| | | hsswdnqcqctssatrnttkqvtpqpeeqkerkttemqspmqpvdqaslpghcrepppweneateriyhfvvgqmvyy |
| | | qcvqgyralhrgpaesvckmthgktrwtqpqlictgemetsqfpgeekpqaspegrpesetsSlvtttdfqiqtemaatme |
| | | tsiftteyqggggsggggsggggsggggsggggsggggssggpGPAGLYAQpgsaptssstkktqlqlehllldlqm |
| | | ilnginnyknpkltrmltfkfympkkatelkhlqcleeelkpleevlnlaqsknfhlrprdlisninvivlelkgsettfmceya |
| | | detativeflnrwitfcqsiistlt** |
| 341 | ACP422 | EVQLVESGGGLVQPGNSLRLSCAASGFTFSKFGMSWVRQAPGKGLEWVSSISGS |
| | | GRDTLYAESVKGRFTISRDNAKTTLYLQMNSLRPEDTAVYYCTIGGSLSVSSQGT |
| | | LVTVSSsggpGPAGLYAQpgsEVQLVESGGGLVQPGGSLRLSCAASGFTFSSYTLA |
| | | WVRQAPGKGLEWVAAIDSSSYTYSPDTVRGRFTISRDNAKNSLYLQMNSLRAE |
| | | DTAVYYCARDSNWDALDYWGcGTTVTVSSGGGGSGGGGSGGGGSDIQMTQSP |
| | | SSLSASVGDRVTITCKAREKLW SAVAWYQQKPGKcPKALIYSASFRYSGVPSRFS |
| | | GSGSGTDFTLTISSLQPEDFATYYCQQYYTYPYTFGGGTKVEIKggggsggggsggggs |
| | | ggggsggggsggggsggggsggggsggggselcdddppeiphatfkamaykegtmlnceckrgfrriksgslymlctg |
| | | nsshsswdnqcqctssatrnttkqvtpqpeeqkerkttemqspmqpvdqaslpghcrepppweneateriyhfvvgqm |
| | | vyyqcvqgyralhrgpaesvckmthgktrwtqpqlictgemetsqfpgeekpqaspegrpesetsSlvtttdfqiqtemaa |
| | | tmetsiftteyqggggsggggsggggsggggsggggsggggssggpGPAGLYAQpgsaptssstkktqlqlehllld |
| | | lqmilnginnyknpkltrmlafympkkatelkhlqcleeelkpleevlnlaqsknfhlrprdlisninvivlelkgsettfm |
| | | ceyadetativeflnrwitfcqsiistlt** |
| 342 | ACP423 | EVQLVESGGGLVQPGNSLRLSCAASGFTFSKFGMSWVRQAPGKGLEWVSSISGS |
| | | GRDTLYAESVKGRFTISRDNAKTTLYLQMNSLRPEDTAVYYCTIGGSLSVSSQGT |
| | | LVTVSSsggpGPAGLYAQpgsEVQLVESGGGLVQPGGSLRLSCAASGFTFSSYTLA |
| | | WVRQAPGKcLEWVAAIDSSSYTYSPDTVRGRFTISRDNAKNSLYLQMNSLRAED |
| | | TAVYYCARDSNWDALDYWGQGTTVTVSSGGGGSGGGGSGGGGSDIQMTQSPS |
| | | SLSASVGDRVTITCKVTEKVWGNVAWYQQKPGKAPISLIYSPSLRKSGVPSRFSG |
| | | SGSGTDFTLTISSLQPEDFATYYCQQYYTYPYTFGcGTKVEIKggggsggggsggggsgg |
| | | ggsggggsggggsggggsggggsggggselcdddppeiphatfkamaykegtmlnceckrgfrriksgslymlctgnss |
| | | hsswdnqcqctssatrnttkqvtpqpeeqkerkttemqspmqpvdqaslpghcrepppweneateriyhfvvgqmvyy |
| | | qcvqgyralhrgpaesvckmthgktrwtqpqlictgemetsqfpgeekpqaspegrpesetsSlvtttdfqiqtemaatme |
| | | tsiftteyqggggsggggsggggsggggsggggsggggssggpGPAGLYAQpgsaptssstkktqlqlehllldlqm |
| | | ilnginnyknpkltrmltfkfympkkatelkhlqcleeelkpleevlnlaqsknfhlrprdlisninvivlelkgsettfmceya |
| | | detativeflnrwitfcqsiistlt** |
| 343 | ACP424 | EVQLVESGGGLVQPGNSLRLSCAASGFTFSKFGMSWVRQAPGKGLEWVSSISGS |
| | | GRDTLYAESVKGRFTISRDNAKTTLYLQMNSLRPEDTAVYYCTIGGSLSVSSQGT |
| | | LVTVSSsggpGPAGLYAQpgsEVQLVESGGGLVQPGGSLRLSCAASGFTFSSYTLA |
| | | WVRQAPGKGLEWVAAIDSSSYTYSPDTVRGRFTISRDNAKNSLYLQMNSLRAE |
| | | DTAVYYCARDSNWDALDYWGcGTTVTVSSGGGGSGGGGSGGGGSDIQMTQSP |
| | | SSLSASVGDRVTITCKVTEKVWGNVAWYQQKPGKcPISLIYSPSLRKSGVPSRFS |
| | | GSGSGTDFTLTISSLQPEDFATYYCQQYYTYPYTFGGGTKVEIKggggsggggsggggs |
| | | ggggsggggsggggsggggsggggsggggselcdddppeiphatfkamaykegtmlnceckrgfrriksgslymlctg |
| | | nsshsswdnqcqctssatrnttkqvtpqpeeqkerkttemqspmqpvdqaslpghcrepppweneateriyhfvvgqm |
| | | vyyqcvqgyralhrgpaesvckmthgktrwtqpqlictgemetsqfpgeekpqaspegrpesetsSlvtttdfqiqtemaa |
| | | tmetsiftteyqggggsggggsggggsggggsggggsggggssggpGPAGLYAQpgsaptssstkktqlqlehllld |
| | | lqmilnginnyknpkltrmlafympkkatelkhlqcleeelkpleevlnlaqsknfhlrprdlisninvivlelkgsettfm |
| | | ceyadetativeflnrwitfcqsiistlt** |
| 344 | Acp425 | EVQLVESGGGLVQPGNSLRLSCAASGFTFSKFGMSWVRQAPGKGLEWVSSISGS |
| | | GRDTLYAESVKGRFTISRDNAKTTLYLQMNSLRPEDTAVYYCTIGGSLSVSSQGT |
| | | LVTVSSsggpGPAGLYAQpgsevqllesggglvqpggslrlscaasgsifsanamgwyrqapgkqrelvaviss |
| | | ggstnyadsvkgrftisrdnskntvylqmnslraedtavyycmysgsyyytpndywgqgtlvtvssggggsggggsggg |
| | | gsggggsggggsggggsggggsggggsggggselcdddppeiphatfkamaykegtmlnceckrgfrriksgslymlc |
| | | tgnsshsswdnqcqctssatrnttkqvtpqpeeqkerkttemqspmqpvdqaslpghcrepppweneateriyhfvvgq |
| | | mvyyqcvqgyralhrgpaesvckmthgktrwtqpqlictgemetsqfpgeekpqaspegrpesetsSlvtttdfqiqtem |
| | | aatmetsiftteyqggggsggggsggggsggggsggggsggggssggpGPAGLYAQpgsaptssstkktqlqlehll |
| | | ldlqmilnginnyknpkltrmltfkfympkkatelkhlqcleeelkpleevlnlaqsknfhlrprdlisninvivlelkgsettf |
| | | [sequence omitted] |
| 345 | ACP426 | EVQLVESGGGLVQPGNSLRLSCAASGFTFSKFGMSWVRQAPGKGLEWVSSISGS |
| | | GRDTLYAESVKGRFTISRDNAKTTLYLQMNSLRPEDTAVYYCTIGGSLSVSSQGT |
| | | LVTVSSsggpGPAGLYAQpgsevqllesggglvqpggslrlscaasgsifsanamgwyrqapgkglelvaviss |
| | | ggstnyadsvkgrftisrdnskntvylqmnslraedtavyycmysgsyyytpndywgqgtlvtvssggggsggggsggg |
| | | gsggggsggggsggggsggggsggggsggggselcdddppeiphatfkamaykegtmlnceckrgfrriksgslymlc |
| | | tgnsshsswdnqcqctssatrnttkqvtpqpeeqkerkttemqspmqpvdqaslpghcrepppweneateriyhfvvgq |
| | | mvyyqcvqgyralhrgpaesvckmthgktrwtqpqlictgemetsqfpgeekpqaspegrpesetsSlvtttdfqiqtem |
| | | aatmetsiftteyqggggsggggsggggsggggsggggsggggssggpGPAGLYAQpgsaptssstkktqlqlehll |
| | | ldlqmilnginnyknpkltrmltfkfympkkatelkhlqcleeelkpleevlnlaqsknfhlrprdlisninvivlelkgsettf |
| | | [sequence omitted] |
| 346 | ACP427 | aptssstkktqlqlehllldlqmilnginnyknpkltrmltfkfympkkatelkhlqcleeelkpleevlnlaqsknfhlrprdli |
| | | sninvivlelkgsettfmceyadetativeflnrwitfcqsiistltsggpGPAGLYAQpgsEVQLVESGGGLV |
| | | QPGNSLRLSCAASGFTFSKFGMSWVRQAPGKGLEWVSSISGSGRDTLYAESVKG |
| | | RFTISRDNAKTTLYLQMNSLRPEDTAVYYCTIGGSLSVSSQGTLVTVSSggggsgggg |
| | | sggggsggggsggggsggggssggpGPAGLYAQpgsEVQLVESGGGLVQPGGSLRLSCAAS |
| | | GFTFSSYTLAWVRQAPGKcLEWVAAIDSSSYTYSPDTVRGRFTISRDNAKNSLYL |
| | | QMNSLRAEDTAVYYCARDSNWDALDYWGQGTTVTVSSGGGGSGGGGSGGGG |
| | | SDIQMTQSPSSLSASVGDRVTITCKAREKLWSAVAWYQQKPGKAPKsLIYSASFR |
| | | YSGVPSRFSGSGSGTDFTLTISSLQPEDFATYYCQQYYTYPYTFGcGTKVEIKgggg |
| | | sggggsggggsggggsggggsggggsevqllesggglvqpggslrlscaasgsifsanamgwyrqapgkqrelvaviss |
| | | ggstnyadsvkgrftisrdnskntvylqmnslraedtavyycmysgsyyytpndywgqgtlvtvss** |
| 347 | ACP428 | aptssstkktqlqlehllldlqmilnginnyknpkltrmltfkfympkkatelkhlqcleeelkpleevlnlaqsknfhlrprdli |
| | | sninvivlelkgsettfmceyadetativeflnrwitfcqsiistltsggpGPAGLYAQpgsEVQLVESGGGLV |
| | | QPGNSLRLSCAASGFTFSKFGMSWVRQAPGKGLEWVSSISGSGRDTLYAESVKG |
| | | RFTISRDNAKTTLYLQMNSLRPEDTAVYYCTIGGSLSVSSQGTLVTVSSggggsgggg |
| | | sggggsggggsggggsggggssggpGPAGLYAQpgsEVQLVESGGGLVQPGGSLRLSCAAS |
| | | GFTFSSYTLAWVRQAPGKGLEWVAAIDSSSYTYSPDTVRGRFTISRDNAKNSLY |
| | | LQMNSLRAEDTAVYYCARDSNWDALDYWGcGTTVTVSSGGGGSGGGGSGGGG |
| | | SDIQMTQSPSSLSASVGDRVTITCKAREKLWSAVAWYQQKPGKcPKALIYSASFR |
| | | YSGVPSRFSGSGSGTDFTLTISSLQPEDFATYYCQQYYTYPYTFGGGTKVEIKggg |
| | | gsggggsggggsggggsggggsggggsevqllesggglvqpggslrlscaasgsifsanamgwyrqapgkqrelvavis |
| | | sggstnyadsvkgrftisrdnskntvylqmnslraedtavyycmysgsyyytpndywgqgtlvtvss** |
| 348 | ACP429 | aptssstkktqlqlehllldlqmilnginnyknpkltrmltfkfympkkatelkhlqcleeelkpleevlnlaqsknfhlrprdli |
| | | sninvivlelkgsettfmceyadetativeflnrwitfcqsiistltsggpGPAGLYAQpgsEVQLVESGGGLV |
| | | QPGNSLRLSCAASGFTFSKFGMSWVRQAPGKGLEWVSSISGSGRDTLYAESVKG |
| | | RFTISRDNAKTTLYLQMNSLRPEDTAVYYCTIGGSLSVSSQGTLVTVSSggggsgggg |
| | | sggggsggggsggggsggggssggpGPAGLYAQpgsEVQLVESGGGLVQPGGSLRLSCAAS |
| | | GFTFSSYTLAWVRQAPGKcLEWVAAIDSSSYTYSPDTVRGRFTISRDNAKNSLYL |
| | | QMNSLRAEDTAVYYCARDSNWDALDYWGQGTTVTVSSGGGGSGGGGSGGGG |
| | | SDIQMTQSPSSLSASVGDRVTITCKVTEKVWGNVAWYQQKPGKAPISLIYSPSLR |
| | | KSGVPSRFSGSGSGTDFTLTISSLQPEDFATYYCQQYYTYPYTFGcGTKVEIKgggg |
| | | sggggsggggsggggsggggsggggsevqllesggglvqpggslrlscaasgsifsanamgwyrqapgkqrelvaviss |
| | | ggstnyadsvkgrftisrdnskntvylqmnslraedtavyycmysgsyyytpndywgqgtlvtvss** |
| 349 | ACP430 | aptssstkktqlqlehllldlqmilnginnyknpkltrmltfkfympkkatelkhlqcleeelkpleevlnlaqsknfhlrprdli |
| | | sninvivlelkgsettfmceyadetativeflnrwitfcqsiistltsggpGPAGLYAQpgsEVQLVESGGGLV |
| | | QPGNSLRLSCAASGFTFSKFGMSWVRQAPGKGLEWVSSISGSGRDTLYAESVKG |
| | | RFTISRDNAKTTLYLQMNSLRPEDTAVYYCTIGGSLSVSSQGTLVTVSSggggsgggg |
| | | sggggsggggsggggsggggssggpGPAGLYAQpgsEVQLVESGGGLVQPGGSLRLSCAAS |
| | | GFTFSSYTLAWVRQAPGKGLEWVAAIDSSSYTYSPDTVRGRFTISRDNAKNSLY |
| | | LQMNSLRAEDTAVYYCARDSNWDALDYWGcGTTVTVSSGGGGSGGGGSGGGG |
| | | SDIQMTQSPSSLSASVGDRVTITCKVTEKVWGNVAWYQQKPGKcPISLIYSPSLR |
| | | KSGVPSRFSGSGSGTDFTLTISSLQPEDFATYYCQQYYTYPYTFGGGTKVEIKggg |
| | | gsggggsggggsggggsggggsggggsevqllesggglvqpggslrlscaasgsifsanamgwyrqapgkqrelvavis |
| | | sggstnyadsvkgrftisrdnskntvylqmnslraedtavyycmysgsyyytpndywgqgtlvtvss** |
| 350 | ACP431 | aptssstkktqlqlehllldlqmilnginnyknpkltrmltfkfympkkatelkhlqcleeelkpleevlnlaqsknfhlrprdli |
| | | sninvivlelkgsettfmceyadetativeflnrwitfcqsiistltsggpGPAGLYAQpgsEVQLVESGGGLV |
| | | QPGNSLRLSCAASGFTFSKFGMSWVRQAPGKGLEWVSSISGSGRDTLYAESVKG |
| | | RFTISRDNAKTTLYLQMNSLRPEDTAVYYCTIGGSLSVSSQGTLVTVSSggggsgggg |
| | | sggggsggggsggggsggggssggpGPAGLYAQpgsEVQLVESGGGLVQPGGSLRLSCAAS |
| | | GFTFSSYTLAWVRQAPGKcLEWVAAIDSSSYTYSPDTVRGRFTISRDNAKNSLYL |
| | | QMNSLRAEDTAVYYCARDSNWDALDYWGQGTTVTVSSGGGGSGGGGSGGGG |
| | | SDIQMTQSPSSLSASVGDRVTITCKAREKLWSAVAWYQQKPGKAPKsLIYSASFR |
| | | YSGVPSRFSGSGSGTDFTLTISSLQPEDFATYYCQQYYTYPYTFGcGTKVEIKgggg |
| | | sggggsggggsggggsggggsggggsevqllesggglvqpggslrlscaasgsifsanamgwyrqapgkglelvaviss |
| | | ggstnyadsvkgrftisrdnskntvylqmnslraedtavyycmysgsyyytpndywgqgtlvtvss** |
| 351 | ACP432 | aptssstkktqlqlehllldlqmilnginnyknpkltrmltfkfympkkatelkhlqcleeelkpleevlnlaqsknfhlrprdli |
| | | sninvivlelkgsettfmceyadetativeflnrwitfcqsiistltsggpGPAGLYAQpgsEVQLVESGGGLV |
| | | QPGNSLRLSCAASGFTFSKFGMSWVRQAPGKGLEWVSSISGSGRDTLYAESVKG |
| | | RFTISRDNAKTTLYLQMNSLRPEDTAVYYCTIGGSLSVSSQGTLVTVSSggggsgggg |
| | | sggggsggggsggggsggggssggpGPAGLYAQpgsEVQLVESGGGLVQPGGSLRLSCAAS |
| | | GFTFSSYTLAWVRQAPGKGLEWVAAIDSSSYTYSPDTVRGRFTISRDNAKNSLY |
| | | LQMNSLRAEDTAVYYCARDSNWDALDYWGcGTTVTVSSGGGGSGGGGSGGGG |
| | | SDIQMTQSPSSLSASVGDRVTITCKAREKLWSAVAWYQQKPGKcPKALIYSASFR |
| | | YSGVPSRFSGSGSGTDFTLTISSLQPEDFATYYCQQYYTYPYTFGGGTKVEIKggg |
| | | gsggggsggggsggggsggggsggggsevqllesggglvqpggslrlscaasgsifsanamgwyrqapgkglelvavis |
| | | sggstnyadsvkgrftisrdnskntvylqmnslraedtavyycmysgsyyytpndywgqgtlvtvss** |
| 352 | ACP433 | aptssstkktqlqlehllldlqmilnginnyknpkltrmltfkfympkkatelkhlqcleeelkpleevlnlaqsknfhlrprdli |
| | | sninvivlelkgsettfmceyadetativeflnrwitfcqsiistltsggpGPAGLYAQpgsEVQLVESGGGLV |
| | | QPGNSLRLSCAASGFTFSKFGMSWVRQAPGKGLEWVSSISGSGRDTLYAESVKG |
| | | RFTISRDNAKTTLYLQMNSLRPEDTAVYYCTIGGSLSVSSQGTLVTVSSggggsgggg |
| | | sggggsggggsggggsggggssggpGPAGLYAQpgsEVQLVESGGGLVQPGGSLRLSCAAS |
| | | GFTFSSYTLAWVRQAPGKcLEWVAAIDSSSYTYSPDTVRGRFTISRDNAKNSLYL |
| | | QMNSLRAEDTAVYYCARDSNWDALDYWGQGTTVTVSSGGGGSGGGGSGGGG |
| | | SDIQMTQSPSSLSASVGDRVTITCKVTEKVWGNVAWYQQKPGKAPISLIYSPSLR |
| | | KSGVPSRFSGSGSGTDFTLTISSLQPEDFATYYCQQYYTYPYTFGcGTKVEIKgggg |
| | | sggggsggggsggggsggggsggggsevqllesggglvqpggslrlscaasgsifsanamgwyrqapgkglelvaviss |
| | | ggstnyadsvkgrftisrdnskntvylqmnslraedtavyycmysgsyyytpndywgqgtlvtvss** |
| 353 | ACP434 | aptssstkktqlqlehllldlqmilnginnyknpkltrmltfkfympkkatelkhlqcleeelkpleevlnlaqsknfhlrprdli |
| | | sninvivlelkgsettfmceyadetativeflnrwitfcqsiistltsggpGPAGLYAQpgsEVQLVESGGGLV |
| | | QPGNSLRLSCAASGFTFSKFGMSWVRQAPGKGLEWVSSISGSGRDTLYAESVKG |
| | | RFTISRDNAKTTLYLQMNSLRPEDTAVYYCTIGGSLSVSSQGTLVTVSSggggsgggg |
| | | sggggsggggsggggsggggssggpGPAGLYAQpgsEVQLVESGGGLVQPGGSLRLSCAAS |
| | | GFTFSSYTLAWVRQAPGKGLEWVAAIDSSSYTYSPDTVRGRFTISRDNAKNSLY |
| | | LQMNSLRAEDTAVYYCARDSNWDALDYWGcGTTVTVSSGGGGSGGGGSGGGG |
| | | SDIQMTQSPSSLSASVGDRVTITCKVTEKVWGNVAWYQQKPGKcPISLIYSPSLR |
| | | KSGVPSRFSGSGSGTDFTLTISSLQPEDFATYYCQQYYTYPYTFGGGTKVEIKggg |
| | | gsggggsggggsggggsggggsggggsevqllesggglvqpggslrlscaasgsifsanamgwyrqapgkglelvavis |
| | | sggstnyadsvkgrftisrdnskntvylqmnslraedtavyycmysgsyyytpndywgqgtlvtvss** |
| 265 | ACP435 | DIQMTQSPSSLSASVGDRVTITCKAREKLWSAVAWYQQKPGKAPKsLIYSASFR |
| | | YSGVPSRFSGSGSGTDFTLTISSLQPEDFATYYCQQYYTYPYTFGGGTKVEIKrtvaa |
| | | psvfifppsdeqlksgtasvvcllnnfypreakvqwkvdnalqsgnsqesvteqdskdstyslsstltlskadyekhkvyac |
| | | evthqglsspvtksfnrgecggggsggggsggggsggggsggggsggggsevqllesggglvqpggslrlscaasgsifsa |
| | | namgwyrqapgkqrelvavissggstnyadsvkgrftisrdnskntvylqmnslraedtavyycmysgsyyytpndyw |
| | | gqgtlvtvss** |
| 355 | ACP371 | aptssstkktqlqlehllldlqmilnginnyknpkltrmltfldympkkatelkhlqcleeelkpleevlnlaqsknf |
| | | hlrprdlisninvivlelkgsettfmceyadetativeflnrwitfcqsiistltsggpGPAGLYAQpgsEVQ |
| | | LVESGGGLVQPGNSLRLSCAASGFTFSKFGMSWVRQAPGKGLEWVSSIS |
| | | GSGRDTLYAESVKGRFTISRDNAKTTLYLQMNSLRPEDTAVYYCTIGGSL |
| | | SVSSQGTLVTVSSggggsggggsggggsggggsggggsggggssggpGPAGLYAQpgsEV |
| | | QLVESGGGLVQPGGSLRLSCAASGFTFSSYTLAWVRQAPGKcLEWVAAI |
| | | DSSSYTYSPDTVRGRFTISRDNAKNSLYLQMNSLRAEDTAVYYCARDSN |
| | | WDALDYWGQGTTVTVSSGGGGSGGGGSGGGGSDIQMTQSPSSLSASVG |
| | | DRVTITCKASQNVGTNVGWYQQKPGKAPKALIYSASFRYSGVPSRFSGS |
| | | GSGTDFTLTISSLQPEDFATYYCQQYYTYPYTFGcGTKVEIK** |
| 356 | ACP372 | aptssstkktqlqlehllldlqmilnginnyknpkltrmltfkfympkkatelkhlqcleeelkpleevlnlaqsknfhlrprdli |
| | | sninvivlelkgsettfmceyadetativeflnrwitfcqsiistltsggpGPAGLYAQpgsEVQLVESGGGLV |
| | | QPGNSLRLSCAASGFTFSKFGMSWVRQAPGKGLEWVSSISGSGRDTLYAESVKG |
| | | RFTISRDNAKTTLYLQMNSLRPEDTAVYYCTIGGSLSVSSQGTLVTVSSggggsgggg |
| | | sggggsggggsggggsggggssggpGPAGLYAQpgsEVQLVESGGGLVQPGGSLRLSCAAS |
| | | GFTFSSYTLAWVRQAPGKGLEWVAAIDSSSYTYSPDTVRGRFTISRDNAKNSLY |
| | | LQMNSLRAEDTAVYYCARDSNWDALDYWGcGTTVTVSSGGGGSGGGGSGGGG |
| | | SDIQMTQSPSSLSASVGDRVTITCKASQNVGTNVGWYQQKPGKcPKALIYSASFR |
| | | YSGVPSRFSGSGSGTDFTLTISSLQPEDFATYYCQQYYTYPYTFGGGTKVEIK** |
| 357 | ACP373 | aptssstkktqlqlehllldlqmilnginnyknpkltrmltfkfympkkatelkhlqcleeelkpleevlnlaqsknfhlrprdli |
| | | sninvivlelkgsettfmceyadetativeflnrwitfcqsiistltsggpGPAGLYAQpgsEVQLVESGGGLV |
| | | QPGNSLRLSCAASGFTFSKFGMSWVRQAPGKGLEWVSSISGSGRDTLYAESVKG |
| | | RFTISRDNAKTTLYLQMNSLRPEDTAVYYCTIGGSLSVSSQGTLVTVSSggggsgggg |
| | | sggggsggggsggggsggggssggpGPAGLYAQpgsEVQLVESGGGLVQPGGSLRLSCAAS |
| | | GFTFSSYTLAWVRQAPGKcLEWVAAIDSSSYTYSPDTVRGRFTISRDNAKNSLYL |
| | | QMNSLRAEDTAVYYCARDSNWDALDYWGQGTTVTVSSGGGGSGGGGSGGGG |
| | | SDIQMTQSPSSLSASVGDRVTITCKAREKLWSAVAWYQQKPGKAPKALIYSASF |
| | | RYSGVPSRFSGSGSGTDFTLTISSLQPEDFATYYCQQYYTYPYTFGcGTKVEIK** |
| 358 | ACP374 | aptssstkktqlqlehllldlqmilnginnyknpkltrmltfkfympkkatelkhlqcleeelkpleevlnlaqsknfhlrprdli |
| | | sninvivlelkgsettfmceyadetativeflnrwitfcqsiistltsggpGPAGLYAQpgsEVQLVESGGGLV |
| | | QPGNSLRLSCAASGFTFSKFGMSWVRQAPGKGLEWVSSISGSGRDTLYAESVKG |
| | | RFTISRDNAKTTLYLQMNSLRPEDTAVYYCTIGGSLSVSSQGTLVTVSSggggsgggg |
| | | sggggsggggsggggsggggssggpGPAGLYAQpgsEVQLVESGGGLVQPGGSLRLSCAAS |
| | | GFTFSSYTLAWVRQAPGKGLEWVAAIDSSSYTYSPDTVRGRFTISRDNAKNSLY |
| | | LQMNSLRAEDTAVYYCARDSNWDALDYWGcGTTVTVSSGGGGSGGGGSGGGG |
| | | SDIQMTQSPSSLSASVGDRVTITCKAREKLWSAVAWYQQKPGKcPKALIYSASFR |
| | | YSGVPSRFSGSGSGTDFTLTISSLQPEDFATYYCQQYYTYPYTFGGGTKVEIK** |
| 359 | ACP375 | aptssstkktqlqlehllldlqmilnginnyknpkltrmltfkfympkkatelkhlqcleeelkpleevlnlaqsknfhlrprdli |
| | | sninvivlelkgsettfmceyadetativeflnrwitfcqsiistltsggpGPAGLYAQpgsEVQLVESGGGLV |
| | | QPGNSLRLSCAASGFTFSKFGMSWVRQAPGKGLEWVSSISGSGRDTLYAESVKG |
| | | RFTISRDNAKTTLYLQMNSLRPEDTAVYYCTIGGSLSVSSQGTLVTVSSggggsgggg |
| | | sggggsggggsggggsggggssggpGPAGLYAQpgsEVQLVESGGGLVQPGGSLRLSCAAS |
| | | GFTFSSYTLAWVRQAPGKcLEWVAAIDSSSYTYSPDTVRGRFTISRDNAKNSLYL |
| | | QMNSLRAEDTAVYYCARDSNWDALDYWGQGTTVTVSSGGGGSGGGGSGGGG |
| | | SDIQMTQSPSSLSASVGDRVTITCKVTEKVWGNVAWYQQKPGKAPISLIYSPSLR |
| | | KSGVPSRFSGSGSGTDFTLTISSLQPEDFATYYCQQYYTYPYTFGcGTKVEIK** |
| 360 | ACP376 | aptssstkktqlqlehllldlqmilnginnyknpkltrmltfkfympkkatelkhlqcleeelkpleevlnlaqsknfhlrprdli |
| | | sninvivlelkgsettfmceyadetativeflnrwitfcqsiistltsggpGPAGLYAQpgsEVQLVESGGGLV |
| | | QPGNSLRLSCAASGFTFSKFGMSWVRQAPGKGLEWVSSISGSGRDTLYAESVKG |
| | | RFTISRDNAKTTLYLQMNSLRPEDTAVYYCTIGGSLSVSSQGTLVTVSSggggsgggg |
| | | sggggsggggsggggsggggssggpGPAGLYAQpgsEVQLVESGGGLVQPGGSLRLSCAAS |
| | | GFTFSSYTLAWVRQAPGKGLEWVAAIDSSSYTYSPDTVRGRFTISRDNAKNSLY |
| | | LQMNSLRAEDTAVYYCARDSNWDALDYWGcGTTVTVSSGGGGSGGGGSGGGG |
| | | SDIQMTQSPSSLSASVGDRVTITCKVTEKVWGNVAWYQQKPGKcPISLIYSPSLR |
| | | KSGVPSRFSGSGSGTDFTLTISSLQPEDFATYYCQQYYTYPYTFGGGTKVEIK** |
| 361 | ACP377 | aptssstkktqlqlehllldlqmilnginnyknpkltrmltfkfympkkatelkhlqcleeelkpleevlnlaqsknfhlrprdli |
| | | sninvivlelkgsettfmceyadetativeflnrwitfcqsiistltsggpGPAGLYAQpgsEVQLVESGGGLV |
| | | QPGNSLRLSCAASGFTFSKFGMSWVRQAPGKGLEWVSSISGSGRDTLYAESVKG |
| | | RFTISRDNAKTTLYLQMNSLRPEDTAVYYCTIGGSLSVSSQGTLVTVSSggggsgggg |
| | | sggggsggggsggggsggggssggpGPAGLYAQpgsevqllesggglvqpggslrlscaasgsifsanamgwyrq |
| | | apgkqrelvavissggstnyadsvkgrftisrdnskntvylqmnslraedtavyycmysgsyyytpndywgqgtlvtvss |
| | | ** |
| 362 | ACP378 | aptssstkktqlqlehllldlqmilnginnyknpkltrmltfkfympkkatelkhlqcleeelkpleevlnlaqsknfhlrprdli |
| | | sninvivlelkgsettfmceyadetativeflnrwitfcqsiistltsggpGPAGLYAQpgsEVQLVESGGGLV |
| | | QPGNSLRLSCAASGFTFSKFGMSWVRQAPGKGLEWVSSISGSGRDTLYAESVKG |
| | | RFTISRDNAKTTLYLQMNSLRPEDTAVYYCTIGGSLSVSSQGTLVTVSSggggsgggg |
| | | sggggsggggsggggsggggssggpGPAGLYAQpgsEVQLVESGGGLVQPGGSLRLSCAAS |
| | | GFTFSSYTLAWVRQAPGKGLEWVAAIDSSSYTYSPDTVRGRFTISRDNAKNSLY |
| | | LQMNSLRAEDTAVYYCARDSNWDALDYWGQGTTVTVSSastkgpsvfplapsskstsggt |
| | | aalgclvkdyfpepvtvswnsgaltsgvhtfpavlqssglyslssvvtvpssslgtqtyicnvnhkpsntkvdkrvepksc* |
| | | * |
| 363 | ACP379 | eskygppcppcpapeflggpsvflfppkpkdtlmisrtpevtcvvvdvsqedpevqfnwyvdgvevhnaktkpreeqf |
| | | nstyrvvsvltvlhqdwlngkeykckvsnkglpssiektiskakgqprepqvytlppsqeemtknqvsltclvkgfypsdi |
| | | avewesngqpennykttppvldsdgsfflysrltvdksrwqegnvfscsvmhealhnhytqkslslslgksggpGPAG |
| | | LYAQpgsaptssstkktqlqlehllldlqmilnginnyknpkltrmltfkfympkkatelkhlqcleeelkpleevlnlaqs |
| | | knfhlrprdlisninvivlelkgsettfmceyadetativeflnrwitfcqsiistltggggsggggsggggsggggsggggsg |
| | | gggssggpGPAGLYAQpgsEVQLVESGGGLVQPGGSLRLSCAASGFTFSSYTLAWVR |
| | | QAPGKGLEWVAAIDSSSYTYSPDTVRGRFTISRDNAKNSLYLQMNSLRAEDTAV |
| | | YYCARDSNWDALDYWGQGTTVTVSSastkgpsvfplapsskstsggtaalgclvkdyfpepvtvswn |
| | | sgaltsgvhtfpavlqssglyslssvvtvpssslgtqtyicnvnhkpsntkvdkrvepksc** |
| 364 | ACP368 | EVQLVESGGGLVQPGGSLRLSCAASGFTFSSYTLAWVRQAPGKGLEWVA |
| | | AIDSSSYTYSPDTVRGRFTISRDNAKNSLYLQMNSLRAEDTAVYYCARDS |
| | | NWDALDYWGQGTTVTVSSsggpGPAGLYAQpgsDIQMTQSPSSLSASVGD |
| | | RVTITCKVTEKVWGNVAWYQQKPGKAPISLIYSPSLRKSGVPSRFSGSGS |
| | | GTDFTLTISSLQPEDFATYYCQQYYTYPYTFGGGTKVEIKHHHHHH |
| 365 | ACP365 | EVQLVESGGGLVQPGGSLRLSCAASGFTFSSYTLAWVRQAPGKGLEWVA |
| | | AIDSSSYTYSPDTVRGRFTISRDNAKNSLYLQMNSLRAEDTAVYYCARDS |
| | | NWDALDYWGQGTTVTVSSsggpGPAGLYAQpgsDIQMTQSPSSLSASVGD |
| | | RVTITCKAREKLW SAVAWYQQKPGKAPKALIYSASFRYSGVPSRFSGSGS |
| | | GTDFTLTISSLQPEDFATYYCQQYYTYPYTFGGGTKVEIKHHHHHH |
| 366 | ACP366 | EVQLVESGGGLVQPGGSLRLSCAASGFTFSSYTLAWVRQAPGKGLEWVAAIDSS |
| | | SYTYSPDTVRGRFTISRDNAKNSLYLQMNSLRAEDTAVYYCARDSNWDALDYW |
| | | GQGTTVTVSSsggpGPAGLYAQpgsDIQMTQSPSSLSASVGDRVTITCKAREKLWS |
| | | AVAWYQQKPGKAPKsLIYSASFRYSGVPSRFSGSGSGTDFTLTISSLQPEDFATYY |
| | | CQQYYTYPYTFGGGTKVEIKHHHHHH |
| 367 | ACP284 | EVQLVESGGGLVQPGNSLRLSCAASGFTFSKFGMSWVRQAPGKGLEWVS |
| | | SISGSGRDTLYAESVKGRFTISRDNAKTTLYLQMNSLRPEDTAVYYCTIG |
| | | GSLSVSSQGTLVTVSSSGGPGPAGMKGLPGSrvipvsgparclsqsrnllkttddmvktar |
| | | eklkhysctaedidheditrdqtstlktclplelhknesclatretssttrgsclppqktslmmtlclgsiyedlkmyq |
| | | tefqainaalqnhnhqqiildkgmlvaidelmqslnhngetlrqkppvgeadpyrvkmklcillhafstrvvtinr |
| | | vmgylssaSGGPGPAGMKGLPGSggggsggggsggggsggggsggggsggggsQSVLTQP |
| | | PSVSGAPGQRVTISCSGSRSNIGSNTVKWYQQLPGTAPKLLIYYNDQRPSG |
| | | VPDRFSGSKSGTSASLAITGLQAEDEADYYCQSYDRYTHPALLFGTGTKV |
| | | TVLggggsggggsggggsQVQLVESGGGVVQPGRSLRLSCAASGFTFSSYGMH |
| | | WVRQAPGKGLEWVAFIRYDGSNKYYADSVKGRFTISRDNSKNTLYLQM |
| | | NSLRAEDTAVYYCKTHGSHDNWGQGTMVTVSS |
| 368 | ACP285 | EVQLVESGGGLVQPGNSLRLSCAASGFTFSKFGMSWVRQAPGKGLEWVSSISGS |
| | | GRDTLYAESVKGRFTISRDNAKTTLYLQMNSLRPEDTAVYYCTIGGSLSVSSQGT |
| | | LVTVSSSGGPGPAGMKGLPGSiwelkkdvyvveldwypdapgemvvltcdtpeedgitwtldqssevlg |
| | | sgktltiqvkefgdagqytchkggevlshsllllhkkedgiwstdilkdqkepknktflrceaknysgrftcwwlttistdltfs |
| | | vkssrgssdpqgvtcgaatlsaervrgdnkeyeysvecqedsaSpaaeeslpievmvdavhklkyenytssffirdiikpd |
| | | ppknlqlkplknsrqvevsweypdtwstphsyfsltfcvqvqgkskrekkdrvftdktsatvicrknasisvraqdryysss |
| | | wsewasvpcsggggsggggsggggsrvipvsgparclsqsrnllkttddmvktareklkhysctaedidheditrdqtstlk |
| | | tclplelhknesSlatretssttrgsclppqktslmmtlclgsiyedlkmyqtefqainaalqnhnhqqiildkgmlvaidelm |
| | | qslnhngetlrqkppygeadpyrvkmklcillhafstrvvtinrvmgylssaSGGPGPAGMKGLPGSggggsg |
| | | gggsggggsggggsggggsggggsQSVLTQPPSVSGAPGQRVTISCSGSRSNIGSNTVKWY |
| | | QQLPGTAPKLLIYYNDQRPSGVPDRFSGSKSGTSASLAITGLQAEDEADYYCQSY |
| | | DRYTHPALLFGTGTKVTVLggggsggggsggggsQVQLVESGGGVVQPGRSLRLSCAA |
| | | SGFTFSSYGMHWVRQAPGKGLEWVAFIRYDGSNKYYADSVKGRFTISRDNSKN |
| | | TLYLQMNSLRAEDTAVYYCKTHGSHDNWGQGTMVTVSS |
| 369 | ACP286 | EVQLVESGGGLVQPGNSLRLSCAASGFTFSKFGMSWVRQAPGKGLEWVSSISGS |
| | | GRDTLYAESVKGRFTISRDNAKTTLYLQMNSLRPEDTAVYYCTIGGSLSVSSQGT |
| | | LVTVSSSGGPGPAGMKGLPGSiwelkkdvyvveldwypdapgemvvltcdtpeedgitwtldqssevlg |
| | | sgktltiqvkefgdagqytchkggevlshsllllhkkedgiwstdilkdqkepknktflrceaknysgrftcwwlttistdltfs |
| | | vkssrgssdpqgvtcgaatlsaervrgdnkeyeysvecqedsacpaaeeslpievmvdavhklkyenytssffirdiikpd |
| | | ppknlqlkplknsrqvevsweypdtwstphsyfsltfcvqvqgkskrekkdrvftdktsatvicrknasisvraqdryysss |
| | | wsewasvpcsggggsggggsggggsggggsrvipvsgparclsqsrnllkaddmvktareklkhysctaedidheditr |
| | | dqtstlktclplelhknesclatretssttrgsclppqktslmmtlclgsiyedlkmyqtefqainaalqnhnhqqiildkgmlv |
| | | aidelmqslnhngetlrqkppvgeadpyrvkmklcillhafstrvvtinrvmgylssaSGGPGPAGMKGLPGSg |
| | | gggsggggsggggsggggsggggsggggsQSVLTQPPSVSGAPGQRVTISCSGSRSNIGSNTV |
| | | KWYQQLPGTAPKLLIYYNDQRPSGVPDRFSGSKSGTSASLAITGLQAEDEADYY |
| | | CQSYDRYTHPALLFGTGTKVTVLggggsggggsggggsQVQLVESGGGVVQPGRSLRL |
| | | SCAASGFTFSSYGMHWVRQAPGKGLEWVAFIRYDGSNKYYADSVKGRFTISRD |
| | | NSKNTLYLQMNSLRAEDTAVYYCKTHGSHDNWGQGTMVTVSS |
| 370 | ACP287 | EVQLVESGGGLVQPGNSLRLSCAASGFTFSKFGMSWVRQAPGKGLEWVSSISGS |
| | | GRDTLYAESVKGRFTISRDNAKTTLYLQMNSLRPEDTAVYYCTIGGSLSVSSQGT |
| | | LVTVSSSGGPGPAGMKGLPGSiwelkkdvyvveldwypdapgemvvltcdtpeedgitwtldqssevlg |
| | | sgktltiqvkefgdagqytchkggevlshsllllhkkedgiwstdilkdqkepknktflrceaknysgrftcwwlttistdltfs |
| | | vkssrgssdpqgvtcgaatlsaervrgdnkeyeysvecqedsacpaaeeslpievmvdavhklkyenytssffirdiikpd |
| | | ppknlqlkplknsrqvevsweypdtwstphsyfsltfcvqvqgkskrekkdrvftdktsatvicrknasisvraqdryysss |
| | | wsewasvpcsggggsggggsggggsrvipvsgparclsqsrnllkttddmvktareklkhysctaedidheditrdqtstlk |
| | | tclplelhknesclatretssttrgsclppqktslmmtlclgsiyedlkmyqtefqainaalqnhnhqqiildkgmlvaidelm |
| | | qslnhngetlrqkppvgeadpyrvkmklcillhafstrvvtinrvmgylssaSGGPGPAGMKGLPGSggggsg |
| | | gggsggggsggggsggggsggggsQSVLTQPPSVSGAPGQRVTISCSGSRSNIGSNTVKWY |
| | | QQLPGTAPKLLIYYNDQRPSGVPDRFSGSKSGTSASLAITGLQAEDEADYYCQSY |
| | | DRYTHPALLFGcGTKVTVLggggsggggsggggsQVQLVESGGGVVQPGRSLRLSCAA |
| | | SGFTFSSYGMHWVRQAPGKcLEWVAFIRYDGSNKYYADSVKGRFTISRDNSKNT |
| | | LYLQMNSLRAEDTAVYYCKTHGSHDNWGQGTMVTVSS |
| 371 | ACP288 | EVQLVESGGGLVQPGNSLRLSCAASGFTFSKFGMSWVRQAPGKGLEWVSSISGS |
| | | GRDTLYAESVKGRFTISRDNAKTTLYLQMNSLRPEDTAVYYCTIGGSLSVSSQGT |
| | | LVTVSSSGGPGPAGMKGLPGSiwelkkdvyvveldwypdapgemvvltcdtpeedgitwtldqssevlg |
| | | sgktltiqvkefgdagqytchkggevlshsllllhkkedgiwstdilkdqkepknktflrceaknysgrftcwwlttistdltfs |
| | | vkssrgssdpqgvtcgaatlsaervrgdnkeyeysvecqedsacpaaeeslpievmvdavhklkyenytssffirdiikpd |
| | | ppknlqlkplknsrqveysweypdtwstphsyfsltfcvqvqgkskrekkdrvftdktsatvicrknasisvraqdryysss |
| | | wsewasvpcsggggsggggsggggsrvipvsgparclsqsrnllkttddmvktareklkhysctaedidheditrdqtstlk |
| | | tclplelhknesclatretssttrgsclppqktslmmtlclgsiyedlkmyqtefqainaalqnhnhqqiildkgmlvaidelm |
| | | qslnhngetlrqkppvgeadpyrvkmklcillhafstrvvtinrvmgylssaSGGPGPAGMKGLPGSggggsg |
| | | gggsggggsggggsggggsggggsQSVLTQPPSVSGAPGQRVTISCSGSRSNIGSNTVKWY |
| | | QQLPGTcPKLLIYYNDQRPSGVPDRFSGSKSGTSASLAITGLQAEDEADYYCQSY |
| | | DRYTHPALLFGTGTKVTVLggggsggggsggggsQVQLVESGGGVVQPGRSLRLSCAA |
| | | SGFTFSSYGMHWVRQAPGKGLEWVAFIRYDGSNKYYADSVKGRFTISRDNSKN |
| | | TLYLQMNSLRAEDTAVYYCKTHGSHDNWGcGTMVTVSS |
| 372 | ACP289 | aptssstkktqlqlehllldlqmilnginnyknpkltrmltfldympkkatelkhlqcleeelkpleevlnlaqsknf |
| | | hlrprdlisninvivlelkgsettfmceyadetativeflnrwitfcqsiistltsggpgpagmkglpgsevqlvesg |
| | | gglvqpgnslrlscaasgftfskfgmswvrqapgkglewvssisgsgrdtlyaesvkgrftisrdnakttlylqmn |
| | | slrpedtavyyctiggslsvssqgtlvtvssggggsggggsggggsggggsggggsggggssggpgpagmkgl |
| | | pgsevqlvesggglvqpggslrlscaasgftfssytlawvrqapgkglewvaaidsssvtvspdtvrgrftisrdna |
| | | knslylqmnslraedtavyycardsnwdaldywgqgttvtvssggggsggggsggggsdiqmtqspsslsas |
| | | vgdrvtitckasqnvgtnvgwyqqkpgkapkaliysasfrysgvpsrfsgsgsgtdftltisslqpedfatyycqq |
| | | yytypytfgggtkveikhhhhhh |
| 373 | ACP290 | aptssstkktqlqlehllldlqmilnginnyknpkltrmltfkfympkkatelkhlqcleeelkpleevlnlaqsknfhlrprdli |
| | | sninvivlelkgsettfmceyadetativeflnrwitfcqsiistltsggpgpagmkglpgsevqlvesggglvqpgnslrlsca |
| | | asgftfskfgmswvrqapgkglewvssisgsgrdtlyaesvkgrftisrdnakttlylqmnslrpedtavyyctiggslsvss |
| | | qgtlvtvssggggsggggsggggsggggsggggsggggssggpgpagmkglpgQVQLQESGGGLVQTGG |
| | | SLRLSCTTSGTIFSGYTMGWYRQAPGEQRELVAVISGGGDTNYADSVKGRFTISR |
| | | DNTKDTMYLQMNSLKPEDTAVYYCYSREVTPPWKLYWGQGTQVTVSSAAAYP |
| | | YDVPDYGSHHHHHH |
| 374 | ACP291 | aptssstkktqlqlehllldlqmilnginnyknpkltrmltfkfympkkatelkhlqcleeelkpleevlnlaqsknfhlrprdli |
| | | sninvivlelkgsettfmceyadetativeflnrwitfcqsiistltsggpgpagmkglpgsevqlvesggglvqpgnslrlsca |
| | | asgftfskfgmswvrqapgkglewvssisgsgrdtlyaesvkgrftisrdnakttlylqmnslrpedtavyyctiggslsvss |
| | | qgtlvtvssggggsggggsggggsggggsggggsggggssggpgpagmkglpgQVQLQESGGGLVQEGG |
| | | SLRLSCAASERIFSTDVMGWYRQAAEKQRELVAVVSARGTTNYLDAVKGRFTIS |
| | | RDNARNTLTLQMNDLKPEDTASYYCYVRETTSPWRIYWGQGTQVTVSSAAAYP |
| | | YDVPDYGSHHHHHH |
| 375 | ACP292 | aptssstkktqlqlehllldlqmilnginnyknpkltrmltfkfympkkatelkhlqcleeelkpleevlnlaqsknfhlrprdli |
| | | sninvivlelkgsettfmceyadetativeflnrwitfcqsiistltsggpgpagmkglpgsevqlvesggglvqpgnslrlsca |
| | | asgftfskfgmswvrqapgkglewvssisgsgrdtlyaesvkgrftisrdnakttlylqmnslrpedtavyyctiggslsyss |
| | | qgtlvtvssggggsggggsggggsggggsggggsggggssggpgpagmkglpgQVQLQESGGGLVQAG |
| | | GSLRLSCAASGSIFSANAMGWYRQAPGKQRELVAVISSGGSTNYADSVKGRFTI |
| | | SRDNAKNTVYLQMNSLKPEDTAVYYCMYSGSYYYTPNDYWGQGTQVTVSSAA |
| | | AYPYDVPDYGSHHHHHH |
| 376 | ACP296 | aptssstkktqlqlehllldlqmilnginnyknpkltrmltfldympkkatelkhlqcleeelkpleevlnlaqsknf |
| | | hlrprdlisninvivlelkgsettfmceyadetativeflnrwitfcqsiistltSGGPGPAGMKGLPGSE |
| | | VQLVESGGGLVQPGNSLRLSCAASGFTFSKFGMSWVRQAPGKGLEWVSS |
| | | ISGSGRDTLYAESVKGRFTISRDNAKTTLYLQMNSLRPEDTAVYYCTIGG |
| | | SLSVSSQGTLVTVSSggggsggggsggggsggggsggggsggggsSGGPGPAGMKGLP |
| | | GSEVQLVESGGGLVQPGGSLRLSCAASGFTFSSYTLAWVRQAPGKGLEW |
| | | VAAIDSSSYTYSPDTVRGRFTISRDNAKNSLYLQMNSLRAEDTAVYYCAR |
| | | DSNWDALDYWGQGTTVTVSSSGGPGPAGMKGLPGSDIQMTQSPSSLSAS |
| | | VGDRVTITCKASQNVGTNVGWYQQKPGKAPKALIYSASFRYSGVPSRFS |
| | | GSGSGTDFTLTISSLQPEDFATYYCQQYYTYPYTFGGGTKVEIKEIREIRREI |
| | | EPEA** |
| 377 | Acp297 | aptssstkktqlqlehllldlqmilnginnyknpkltrmltfkfympkkatelkhlqcleeelkpleevlnlaqsknfhlrprdli |
| | | sninvivlelkgsettfmceyadetativeflnrwitfcqsiistltSGGPGPAGMKGLPGSEVQLVESGGG |
| | | LVQPGNSLRLSCAASGFTFSKFGMSWVRQAPGKGLEWVSSISGSGRDTLYAESV |
| | | KGRFTISRDNAKTTLYLQMNSLRPEDTAVYYCTIGGSLSVSSQGTLVTVSSggggsg |
| | | gggsggggsggggsggggsggggsSGGPGPAGMKGLPGSEVQLVESGGGLVQPGGSLRLS |
| | | CAASGFTFSSYTLAWVRQAPGKGLEWVAAIDSSSYTYSPDTVRGRFTISRDNAK |
| | | NSLYLQMNSLRAEDTAVYYCARDSNWDALDYWGQGTTVTVSSGGGGSGGGGS |
| | | GGGGSDIQMTQSPSSLSASVGDRVTITCKASQNVGTNVGWYQQKPGKAPKLLIY |
| | | SASFRYSGVPSRFSGSGSGTDFTLTISSLQPEDFATYYCQQYYTYPYTFGGGTKV |
| | | EIKHHHHHHEPEA** |
| 378 | ACP298 | aptssstkktqlqlehllldlqmilnginnyknpkltrmltfkfympkkatelkhlqcleeelkpleevlnlaqsknfhlrprdli |
| | | sninvivlelkgsettfmceyadetativeflnrwitfcqsiistltSGGPGPAGMKGLPGSEVQLVESGGG |
| | | LVQPGNSLRLSCAASGFTFSKFGMSWVRQAPGKGLEWVSSISGSGRDTLYAESV |
| | | KGRFTISRDNAKTTLYLQMNSLRPEDTAVYYCTIGGSLSVSSQGTLVTVSSggggsg |
| | | gggsggggsggggsggggsggggsSGGPGPAGMKGLPGSEVQLVESGGGLVQPGGSLRLS |
| | | CAASGFTFSSYTLAWVRQAPGKGLEWVAAIDSSSYTYSPDTVRGRFTISRDNAK |
| | | NSLYLQMNSLRAEDTAVYYCARDSNWDALDYWGQGTTVTVSSGGGGSGGGGS |
| | | GGGGSDIQMTQSPSSLSASVGDRVTITCKASQNVGTNVGWYQQKPGKAPKGLIY |
| | | SASFRYSGVPSRFSGSGSGTDFTLTISSLQPEDFATYYCQQYYTYPYTFGGGTKV |
| | | EIKHHHHHHEPEA** |
| 379 | ACP299 | aptssstkktqlqlehllldlqmilnginnyknpkltrmltfidympkkatelkhlqcleeelkpleevlnlaqsknfhlrprdli |
| | | sninvivlelkgsettfmceyadetativeflnrwitfSqsiistltSGGPGPAGMKGLPGSEVQLVESGGG |
| | | LVQPGNSLRLSCAASGFTFSKFGMSWVRQAPGKGLEWVSSISGSGRDTLYAESV |
| | | KGRFTISRDNAKTTLYLQMNSLRPEDTAVYYCTIGGSLSVSSQGTLVTVSSggggsg |
| | | gggsggggsggggsggggsggggsSGGPGPAGMKGLPGSEVQLVESGGGLVQPGGSLRLS |
| | | CAASGFTFSSYTLAWVRQAPGKGLEWVAAIDSSSYTYSPDTVRGRFTISRDNAK |
| | | NSLYLQMNSLRAEDTAVYYCARDSNWDALDYWGQGTTVTVSSGGGGSGGGGS |
| | | GGGGSDIQMTQSPSSLSASVGDRVTITCKASQNVGTNVGWYQQKPGKAPKALIY |
| | | SASFRYSGVPSRFSGSGSGTDFTLTISSLQPEDFATYYCQQYYTYPYTFGGGTKV |
| | | EIKHHHHHHEPEA** |
| 380 | ACP300 | aptssstkktqlqlehllldlqmilnginnyknpkltrmltfidympkkatelkhlqcleeelkpleevlnlaqsknf |
| | | hlrprdlisninvivlelkgsettfmceyadetativeflnrwitfcqsiistltSGGPGPAGMKGLPGSda |
| | | hksevahrfkdlgeenfkalvliafaqylqqcpfedhvklvnevtefaktcvadesaencdkslhtlfgdklctvat |
| | | lretygemadccakqepernecflqhkddnpnlprlvrpevdvmctafhdneetflkkylyeiarrhpyfyape |
| | | llffakrykaafteccqaadkaacllpkldelrdegkassakqrlkcaslqkfgerafkawavarlsqrfpkaefae |
| | | vsklvtdltkvhtecchgdllecaddradlakyicenqdsissklkeccekpllekshciaevendempadlpsla |
| | | adfveskdvcknyaeakdvflgmflyeyarrhpdysvvlllrlaktyettlekccaaadphecyakvfdefkplv |
| | | eepqnlikqncelfeqlgeykfqnallvrytkkvpqvstptlvevsrnlgkvgskcckhpeakrmpcaedylsv |
| | | vlnqlcvlhektpvsdrvtkccteslvnrrpcfsalevdetyvpkefnaetftfhadictlsekerqikkqtalvelvk |
| | | hkpkatkeqlkavmddfaafvekcckaddketcfaeegkklvaasqaalglggggsggggsggggsggggs |
| | | ggggsggggsSGGPGPAGMKGLPGSEVQLVESGGGLVQPGGSLRLSCAASGF |
| | | TFSSYTLAWVRQAPGKGLEWVAAIDSSSYTYSPDTVRGRFTISRDNAKNS |
| | | LYLQMNSLRAEDTAVYYCARDSNWDALDYWGQGTTVTVSSGGGGSGG |
| | | GGSGGGGSDIQMTQSPSSLSASVGDRVTITCKASQNVGTNVGWYQQKPG |
| | | KAPKALIYSASFRYSGVPSRFSGSGSGTDFTLTISSLQPEDFATYYCQQYY |
| | | TYPYTFGGGTKVEIKHHHHHHEPEA** |
| 381 | ACP302 | aptssstkktqlqlehllldlqmilnginnyknpkltrmltfkfympkkatelkhlqcleeelkpleevlnlaqsknf |
| | | hlrprdlisninvivlelkgsettfmceyadetativeflnrwitfcqsiistltSGGPGPAGMKGLPGSE |
| | | AHKSEIAHRYNDLGEQHFKGLVLIAFSQYLQKCSYDEHAKLVQEVTDFA |
| | | KTCVADESAANCDKSLHTLFGDKLCAIPNLRENYGELADCCTKQEPERN |
| | | ECFLQHKDDNPSLPPFERPEAEAMCTSFKENPTTFMGHYLHEVARRHPYF |
| | | YAPELLYYAEQYNEILTQCCAEADKESCLTPKLDGVKEKALVSSVRQRM |
| | | KCSSMQKFGERAFKAWAVARLSQTFPNADFAEITKLATDLTKVNKECCH |
| | | GDLLECADDRAELAKYMCENQATISSKLQTCCDKPLLKKAHCLSEVEHD |
| | | TMPADLPAIAADFVEDQEVCKNYAEAKDVFLGTFLYEYSRRHPDYSVSL |
| | | LLRLAKKYEATLEKCCAEANPPACYGTVLAEFQPLVEEPKNLVKTNCDL |
| | | YEKLGEYGFQNAILVRYTQKAPQVSTPTLVEAARNLGRVGTKCCTLPED |
| | | QRLPCVEDYLSAILNRVCLLHEKTPVSEHVTKCCSGSLVERRPCFSALTV |
| | | DETYVPKEFKAETFTFHSDICTLPEKEKQIKKQTALAELVKHKPKATAEQ |
| | | LKTVMDDFAQFLDTCCKAADKDTCFSTEGPNLVTRCKDALAggggsggggsg |
| | | gggsggggsggggsggggsSGGPGPAGMKGLPGSEVQLVESGGGLVQPGGSLRL |
| | | SCAASGFTFSSYTLAWVRQAPGKGLEWVAAIDSSSYTYSPDTVRGRFTIS |
| | | RDNAKNSLYLQMNSLRAEDTAVYYCARDSNWDALDYWGQGTTVTVSS |
| | | GGGGSGGGGSGGGGSDIQMTQSPSSLSASVGDRVTITCKASQNVGTNVG |
| | | WYQQKPGKAPKALIYSASFRYSGVPSRFSGSGSGTDFTLTISSLQPEDFAT |
| | | YYCQQYYTYPYTFGGGTKVEIKHHHHHH** |
| 382 | ACP303 | EAHKSEIAHRYNDLGEQHFKGLVLIAFSQYLQKCSYDEHAKLVQEVTDFAKTCV |
| | | ADESAANCDKSLHTLFGDKLCAIPNLRENYGELADCCTKQEPERNECFLQHKDD |
| | | NPSLPPFERPEAEAMCTSFKENPTTFMGHYLHEVARRHPYFYAPELLYYAEQYN |
| | | EILTQCCAEADKESCLTPKLDGVKEKALVSSVRQRMKCSSMQKFGERAFKAWA |
| | | VARLSQTFPNADFAEITKLATDLTKVNKECCHGDLLECADDRAELAKYMCENQ |
| | | ATISSKLQTCCDKPLLKKAHCLSEVEHDTMPADLPAIAADFVEDQEVCKNYAEA |
| | | KDVFLGTFLYEYSRRHPDYSVSLLLRLAKKYEATLEKCCAEANPPACYGTVLAE |
| | | FQPLVEEPKNLVKTNCDLYEKLGEYGFQNAILVRYTQKAPQVSTPTLVEAARNL |
| | | GRVGTKCCTLPEDQRLPCVEDYLSAILNRVCLLHEKTPVSEHVTKCCSGSLVERR |
| | | PCFSALTVDETYVPKEFKAETFTFHSDICTLPEKEKQIKKQTALAELVKHKPKAT |
| | | AEQLKTVMDDFAQFLDTCCKAADKDTCFSTEGPNLVTRCKDALASGGPGPAGM |
| | | KGLPGStfkfympkkatelkhlqcleeelkpleevlnlaqsknfhlrprdlisninvivlelkgsettfmceyadetativef |
| | | lnrwitfcqsiistltGGssstkktqlqlehllldlqmilnginnyknpkltrmlSGGPGPAGMKGLPGSEAHK |
| | | SEIAHRYNDLGEQHFKGLVLIAFSQYLQKCSYDEHAKLVQEVTDFAKTCVADES |
| | | AANCDKSLHTLFGDKLCAIPNLRENYGELADCCTKQEPERNECFLQHKDDNPSL |
| | | PPFERPEAEAMCTSFKENPTTFMGHYLHEVARRHPYFYAPELLYYAEQYNEILTQ |
| | | CCAEADKESCLTPKLDGVKEKALVSSVRQRMKCSSMQKFGERAFKAWAVARL |
| | | SQTFPNADFAEITKLATDLTKVNKECCHGDLLECADDRAELAKYMCENQATISS |
| | | KLQTCCDKPLLKKAHCLSEVEHDTMPADLPAIAADFVEDQEVCKNYAEAKDVF |
| | | LGTFLYEYSRRHPDYSVSLLLRLAKKYEATLEKCCAEANPPACYGTVLAEFQPL |
| | | VEEPKNLVKTNCDLYEKLGEYGFQNAILVRYTQKAPQVSTPTLVEAARNLGRV |
| | | GTKCCTLPEDQRLPCVEDYLSAILNRVCLLHEKTPVSEHVTKCCSGSLVERRPCF |
| | | SALTVDETYVPKEFKAETFTFHSDICTLPEKEKQIKKQTALAELVKHKPKATAEQ |
| | | LKTVMDDFAQFLDTCCKAADKDTCFSTEGPNLVTRCKDALAHHHHHH** |
| 383 | ACP304 | aptssstkktqlqlehllldlqmilnginnyknpkltrmltfldympkkatelkhlqcleeelkpleevlnlaqsknf |
| | | hlrprdlisninvivlelkgsettfmceyadetativeflnrwitfcqsiistltSGGPGPAGMKGLPGSE |
| | | VQLVESGGGLVQPGNSLRLSCAASGFTFSKFGMSWVRQAPGKGLEWVSS |
| | | ISGSGRDTLYAESVKGRFTISRDNAKTTLYLQMNSLRPEDTAVYYCTIGG |
| | | SLSVSSQGTLVTVSSggggsggggsggggsggggsggggsggggsSGGPGPAGMKGLP |
| | | GSEVQLVESGGGLVQPGGSLRLSCAASGFTFSSYTLAWVRQAPGKGLEW |
| | | VAAIDSSSYTYSPDTVRGRFTISRDNAKNSLYLQMNSLRAEDTAVYYCAR |
| | | DSNWDALDYWGQGTTVTVSSGGGGSGGGGSGGGGSDIQMTQSPSSLSA |
| | | SVGDRVTITCKASQNVGTNVGWYQQKPGKAPKALIYSASFRYSGVPSRF |
| | | SGSGSGTDFTLTISSLQPEDFATYYCQQYYTYPYTFGGGTKVEIKSGGPGP |
| | | AGMKGLPGSggggsggggsggggsggggsggggsggggselcdddppeiphatfkamaykegtml |
| | | nceckrgfrriksgslymlctgnsshsswdnqcqctssatrnttkqvtpqpeeqkerkttemqspmqpvdqasl |
| | | pghcrepppweneateriyhfvvgqmvyyqcvqgyralhrgpaesvckmthgktrwtqpqlictgemetsq |
| | | fpgeekpgaspegrpesetsclvtttdfqiqtemaatmetsiftteyqHHHHHH** |
| 384 | ACP305 | elcdddppeiphatfkamaykegtmlnceckrgfrriksgslymlctgnsshsswdnqcqctssatrnttkqvtpqpeeqk |
| | | erkttemqspmqpvdqaslpghcrepppweneateriyhfvvgqmvyyqcvqgyralhrgpaesvckmthgktrwtq |
| | | pqlictgemetsqfpgeekpqaspegrpesetsclvtttdfqiqtemaatmetsiftteyqggggsggggsggggsggggsg |
| | | gggsggggsSGGPGPAGMKGLPGSaptssstkktqlqlehllldlqmilnginnyknpkltrmltfkfympkka |
| | | telkhlqcleeelkpleevlnlaqsknfhlrprdlisninvivlelkgsettfmceyadetativeflnrwitfcqsiistltSGGP |
| | | GPAGMKGLPGSEVQLVESGGGLVQPGNSLRLSCAASGFTFSKFGMSWVRQAPG |
| | | KGLEWVSSISGSGRDTLYAESVKGRFTISRDNAKTTLYLQMNSLRPEDTAVYYC |
| | | TIGGSLSVSSQGTLVTVSSggggsggggsggggsggggsggggsggggsSGGPGPAGMKGLPG |
| | | SEVQLVESGGGLVQPGGSLRLSCAASGFTFSSYTLAWVRQAPGKGLEWVAAIDS |
| | | SSYTYSPDTVRGRFTISRDNAKNSLYLQMNSLRAEDTAVYYCARDSNWDALDY |
| | | WGQGTTVTVSSGGGGSGGGGSGGGGSDIQMTQSPSSLSASVGDRVTITCKASQN |
| | | VGTNVGWYQQKPGKAPKALIYSASFRYSGVPSRFSGSGSGTDFTLTISSLQPEDF |
| | | ATYYCQQYYTYPYTFGGGTKVEIKHHHHHH** |
| 385 | ACP306 | aptssstkktqlqlehllldlqmilnginnyknpkltrmltfkfympkkatelkhlqcleeelkpleevlnlaqsknfhlrprdli |
| | | sninvivlelkgsettfmceyadetativeflnrwitfcqsiistltSGGPGPAGMKGLPGSggggsggggsggggs |
| | | ggggsggggsggggselcdddppeiphatfkamaykegtmlnceckrgfrriksgslymlctgnsshsswdnqcqctss |
| | | atrnttkqvtpqpeeqkerkttemqspmqpvdqaslpghcrepppweneateriyhfvvgqmvyyqcvqgyralhrgp |
| | | aesvckmthgktrwtqpqlictgemetsqfpgeekpqaspegrpesetsclvtttdfqiqtemaatmetsiftteyqSGGP |
| | | GPAGMKGLPGSEVQLVESGGGLVQPGNSLRLSCAASGFTFSKFGMSWVRQAPG |
| | | KGLEWVSSISGSGRDTLYAESVKGRFTISRDNAKTTLYLQMNSLRPEDTAVYYC |
| | | TIGGSLSVSSQGTLVTVSSggggsggggsggggsggggsggggsggggsSGGPGPAGMKGLPG |
| | | SEVQLVESGGGLVQPGGSLRLSCAASGFTFSSYTLAWVRQAPGKGLEWVAAIDS |
| | | SSYTYSPDTVRGRFTISRDNAKNSLYLQMNSLRAEDTAVYYCARDSNWDALDY |
| | | WGQGTTVTVSSGGGGSGGGGSGGGGSDIQMTQSPSSLSASVGDRVTITCKASQN |
| | | VGTNVGWYQQKPGKAPKALIYSASFRYSGVPSRFSGSGSGTDFTLTISSLQPEDF |
| | | ATYYCQQYYTYPYTFGGGTKVEIKHHHHHH** |
| 386 | ACP307 | EVQLVESGGGLVQPGNSLRLSCAASGFTFSKFGMSWVRQAPGKGLEWVSSISGS |
| | | GRDTLYAESVKGRFTISRDNAKTTLYLQMNSLRPEDTAVYYCTIGGSLSVSSQGT |
| | | LVTVSSSGGPGPAGMKGLPGStfkfympkkatelkhlqcleeelkpleevlnlaqsknfhlrprdlisninvi |
| | | vlelkgsettfmceyadetativeflnrwitfcqsiistltGGssstkktqlqlehllldlqmilnginnyknpkltrmlSGGP |
| | | GPAGMKGLPGSEVQLVESGGGLVQPGNSLRLSCAASGFTFSKFGMSWVRQAPG |
| | | KGLEWVSSISGSGRDTLYAESVKGRFTISRDNAKTTLYLQMNSLRPEDTAVYYC |
| | | TIGGSLSVSSQGTLVTVSSggggsggggsggggsggggsggggsggggsSGGPGPAGMKGLPG |
| | | SEVQLVESGGGLVQPGGSLRLSCAASGFTFSSYTLAWVRQAPGKGLEWVAAIDS |
| | | SSYTYSPDTVRGRFTISRDNAKNSLYLQMNSLRAEDTAVYYCARDSNWDALDY |
| | | WGQGTTVTVSSGGGGSGGGGSGGGGSDIQMTQSPSSLSASVGDRVTITCKASQN |
| | | VGTNVGWYQQKPGKAPKALIYSASFRYSGVPSRFSGSGSGTDFTLTISSLQPEDF |
| | | ATYYCQQYYTYPYTFGGGTKVEIKHHHHHH** |
| 387 | ACP308 | EVQLVESGGGLVQPGGSLRLSCAASGFTFSSYTLAWVRQAPGKGLEWVAAIDSS |
| | | SYTYSPDTVRGRFTISRDNAKNSLYLQMNSLRAEDTAVYYCARDSNWDALDYW |
| | | GQGTTVTVSSGGGGSGGGGSGGGGSDIQMTQSPSSLSASVGDRVTITCKASQNV |
| | | GTNVGWYQQKPGKAPKALIYSASFRYSGVPSRFSGSGSGTDFTLTISSLQPEDFA |
| | | TYYCQQYYTYPYTFGGGTKVEIKSGGPGPAGMKGLPGSggggsggggsggggsggggsg |
| | | gggsggggsEVQLVESGGGLVQPGNSLRLSCAASGFTFSKFGMSWVRQAPGKGLE |
| | | WVSSISGSGRDTLYAESVKGRFTISRDNAKTTLYLQMNSLRPEDTAVYYCTIGGS |
| | | LSVSSQGTLVTVSSSGGPGPAGMKGLPGStfkfympkkatelkhlqcleeelkpleevlnlaqsknfhl |
| | | rprdlisninvivlelkgsettfmceyadetativeflnrwitfcqsiistltGGssstkktqlqlehllldlqmilnginnyknpk |
| | | ltrmlSGGPGPAGMKGLPGSEVQLVESGGGLVQPGNSLRLSCAASGFTFSKFGMS |
| | | WVRQAPGKGLEWVSSISGSGRDTLYAESVKGRFTISRDNAKTTLYLQMNSLRPE |
| | | DTAVYYCTIGGSLSVSSQGTLVTVSSHHHHHH** |
| 388 | ACP309 | aptssstkktqlqlehllldlqmilnginnyknpkltrmltfkfympkkatelkhlqcleeelkpleevlnlaqsknfhlrprdli |
| | | sninvivlelkgsettfmceyadetativeflnrwitfcqsiistltSGGPGPAGMKGLPGSEVQLVESGGG |
| | | LVQPGNSLRLSCAASGFTFSKFGMSWVRQAPGKGLEWVSSISGSGRDTLYAESV |
| | | KGRFTISRDNAKTTLYLQMNSLRPEDTAVYYCTIGGSLSVSSQGTLVTVSSggggsg |
| | | gggsggggsggggsggggsggggsSGGPGPAGMKGLPGSEVQLVESGGGLVQPGGSLRLS |
| | | CAASGFTFSSYTLAWVRQAPGKGLEWVAAIDSSSYTYSPDTVRGRFTISRDNAK |
| | | NSLYLQMNSLRAEDTAVYYCARDSNWDALDYWGQGTTVTVSSGGGGSGGGGS |
| | | GGGGSDIQMTQSPSSLSASVGDRVTITCKASQNVGTNVGWYQQKPGKAPKSLIY |
| | | SASFRYSGVPSRFSGSGSGTDFTLTISSLQPEDFATYYCQQYYTYPYTFGGGTKV |
| | | EIKHHHHHH** |
| 389 | ACP310 | aptssstkktqlqlehllldlqmilnginnyknpkltrmltfkfympkkatelkhlqcleeelkpleevlnlaqsknfhlrprdli |
| | | sninvivlelkgsettfmceyadetativeflnrwitfcqsiistltSGGPGPAGMKGLPGSEVQLVESGGG |
| | | LVQPGNSLRLSCAASGFTFSKFGMSWVRQAPGKGLEWVSSISGSGRDTLYAESV |
| | | KGRFTISRDNAKTTLYLQMNSLRPEDTAVYYCTIGGSLSVSSQGTLVTVSSggggsg |
| | | gggsggggsggggsggggsggggsSGGPGPAGMKGLPGSEVQLVESGGGLVQPGGSLRLS |
| | | CAASGFTFSSYTLAWVRQAPGKGLEWVAAIDSSSYTYSPDTVRGRFTISRDNAK |
| | | NSLYLQMNSLRAEDTAVYYCARDSNWDALDYWGQGTTVTVSSGGGGSGGGGS |
| | | GGGGSDIQMTQSPSSLSASVGDRVTITCKASQNVGTNVGWYQQKPGQAPRLLIY |
| | | SASFRYSGVPSRFSGSGSGTDFTLTISSLQPEDFATYYCQQYYTYPYTFGGGTKV |
| | | EIKHHHHHH** |
| 390 | ACP311 | aptssstkktqlqlehllldlqmilnginnyknpkltrmltfldympkkatelkhlqcleeelkpleevlnlaqsknf |
| | | hlrprdlisninvivlelkgsettfmceyadetativeflnrwitfcqsiistltSGGPGPAGMKGLPGSes |
| | | kygppcppcpapeflggpsvflfppkpkdtlmisrtpevtcvvvdvsqedpevqfnwyvdgvevhnaktkpr |
| | | eeqfnstyrvvsvltvlhqdwlngkeykckvsnkglpssiektiskakgqprepqvytlppsqeemtknqvslt |
| | | clvkgfypsdiavewesngqpennykttppvldsdgsfflysrltvdksrwqegnvfscsvmhealhnhytqk |
| | | slslslgkggggsggggsggggsggggsggggsggggsSGGPGPAGMKGLPGSEVQLVESG |
| | | GGLVQPGGSLRLSCAASGFTFSSYTLAWVRQAPGKGLEWVAAIDSSSYT |
| | | YSPDTVRGRFTISRDNAKNSLYLQMNSLRAEDTAVYYCARDSNWDALD |
| | | YWGQGTTVTVSSGGGGSGGGGSGGGGSDIQMTQSPSSLSASVGDRVTIT |
| | | CKASQNVGTNVGWYQQKPGKAPKALIYSASFRYSGVPSRFSGSGSGTDF |
| | | TLTISSLQPEDFATYYCQQYYTYPYTFGGGTKVEIKHHHHHHH** |
| 391 | ACP312 | eskygppcppcpapeflggpsvflfppkpkdtlmisrtpevtcvvvdvsqedpevqfnwyvdgvevhnaktkpreeqf |
| | | nstyrvvsvltvlhqdwlngkeykckvsnkglpssiektiskakgqprepqvytlppsqeemtknqvsltclvkgfypsdi |
| | | avewesngqpennykttppvldsdgsfflysrltvdksrwqegnvfscsvmhealhnhytqkslslslgkSGGPGPA |
| | | GMKGLPGSaptssstkktqlqlehllldlqmilnginnyknpkltrmlafympkkatelkhlqcleeelkpleevlnl |
| | | aqsknfhlrprdlisninvivlelkgsettfmceyadetativeflnrwitfcqsiistltggggsggggsggggsggggsgggg |
| | | sggggsSGGPGPAGMKGLPGSEVQLVESGGGLVQPGGSLRLSCAASGFTFSSYTLA |
| | | WVRQAPGKGLEWVAAIDSSSYTYSPDTVRGRFTISRDNAKNSLYLQMNSLRAE |
| | | DTAVYYCARDSNWDALDYWGQGTTVTVSSGGGGSGGGGSGGGGSDIQMTQSP |
| | | SSLSASVGDRVTITCKASQNVGTNVGWYQQKPGKAPKALIYSASFRYSGVPSRF |
| | | SGSGSGTDFTLTISSLQPEDFATYYCQQYYTYPYTFGGGTKVEIKHHHHHH** |
| 392 | ACP313 | aptssstkktqlqlehllldlqmilnginnyknpkltrmltfkfympkkatelkhlqcleeelkpleevlnlaqsknfhlrprdli |
| | | sninvivlelkgsettfmceyadetativeflnrwitfcqsiistltSGGPGPAGMKGLPGSggggsggggsggggs |
| | | ggggsggggsggggsEVQLVESGGGLVQPGGSLRLSCAASGFTFSSYTLAWVRQAPGK |
| | | GLEWVAAIDSSSYTYSPDTVRGRFTISRDNAKNSLYLQMNSLRAEDTAVYYCAR |
| | | DSNWDALDYWGQGTTVTVSSGGGGSGGGGSGGGGSDIQMTQSPSSLSASVGDR |
| | | VTITCKASQNVGTNVGWYQQKPGKAPKALIYSASFRYSGVPSRFSGSGSGTDFT |
| | | LTISSLQPEDFATYYCQQYYTYPYTFGGGTKVEIKSGGPGPAGMKGLPGSeskygpp |
| | | cppcpapeflggpsvflfppkpkdtlmisrtpevtcvvvdvsqedpevqfnwyvdgvevhnaktkpreeqfnstyrvvs |
| | | vltvlhqdwlngkeykckvsnkglpssiektiskakgqprepqvytlppsqeemtknqvsltclvkgfypsdiavewesn |
| | | gqpennykappvldsdgsfflysrltvdksrwqegnvfscsvmhealhnhytqkslslslgkHHHHHH** |
| 393 | ACP314 | vprdcgckpcictvpevssvfifppkpkdvltitltpkvtcvvvdiskddpevqfswfvddvevhtaqtqpreeq |
| | | fnstfrsvselpimhqdwlngkefkcrvnsaafpapiektisktkgrpkapqvytipppkeqmakdkvsltcmi |
| | | tdffpeditvewqwngqpaenykntqpimdtdgsyfvysklnvqksnweagntftcsvlheglhnhhteksls |
| | | hspgkSGGPGPAGMKGLPGSaptssstkktqlqlehllldlqmilnginnyknpkltrmltfldympk |
| | | katelkhlqcleeelkpleevlnlaqsknfhlrprdlisninvivlelkgsettfmceyadetativeflnrwitfcqsii |
| | | stltggggsggggsggggsggggsggggsggggsSGGPGPAGMKGLPGSEVQLVESGGG |
| | | LVQPGGSLRLSCAASGFTFSSYTLAWVRQAPGKGLEWVAAIDSSSYTYSP |
| | | DTVRGRFTISRDNAKNSLYLQMNSLRAEDTAVYYCARDSNWDALDYWG |
| | | QGTTVTVSSGGGGSGGGGSGGGGSDIQMTQSPSSLSASVGDRVTITCKAS |
| | | QNVGTNVGWYQQKPGKAPKALIYSASFRYSGVPSRFSGSGSGTDFTLTIS |
| | | SLQPEDFATYYCQQYYTYPYTFGGGTKVEIKHHHHHH** |
| 394 | ACP336 | aptssstkktqlqlehllldlqmilnginnyknpkltrmltfidympkkatelkhlqcleeelkpleevlnlaqsknf |
| | | hlrprdlisninvivlelkgsettfmceyadetativeflnrwitfcqsiistltsggpGPAGLYAQpgsEVQ |
| | | LVESGGGLVQPGNSLRLSCAASGFTFSKFGMSWVRQAPGKGLEWVSSIS |
| | | GSGRDTLYAESVKGRFTISRDNAKTTLYLQMNSLRPEDTAVYYCTIGGSL |
| | | SVSSQGTLVTVSSggggsggggsggggsggggsggggsggggssggpGPAGLYAQpgsEV |
| | | QLVESGGGLVQPGGSLRLSCAASGFTFSSYTLAWVRQAPGKGLEWVAAI |
| | | DSSSYTYSPDTVRGRFTISRDNAKNSLYLQMNSLRAEDTAVYYCARDSN |
| | | WDALDYWGQGTTVTVSSsggpGPAGLYAQpgsDIQMTQSPSSLSASVGDR |
| | | VTITCKAREKLWSAVAWYQQKPGKAPKsLIYSASFRYSGVPSRFSGSGSG |
| | | TDFTLTISSLQPEDFATYYCQQYYTYPYTFGGGTKVEIK** |
| 395 | ACP337 | aptssstkktqlqlehllldlqmilnginnyknpkltrmltfkfympkkatelkhlqcleeelkpleevlnlaqsknfhlrprdli |
| | | sninvivlelkgsettfmceyadetativeflnrwitfcqsiistltsggpGPAGLYAQpgsEVQLVESGGGLV |
| | | QPGNSLRLSCAASGFTFSKFGMSWVRQAPGKGLEWVSSISGSGRDTLYAESVKG |
| | | RFTISRDNAKTTLYLQMNSLRPEDTAVYYCTIGGSLSVSSQGTLVTVSSggggsgggg |
| | | sggggsggggsggggsggggssggpGPAGLYAQpgsEVQLVESGGGLVQPGGSLRLSCAAS |
| | | GFTFSSYTLAWVRQAPGKGLEWVAAIDSSSYTYSPDTVRGRFTISRDNAKNSLY |
| | | LQMNSLRAEDTAVYYCARDSNWDALDYWGQGTTVTVSSGGGGSGGGGSGGG |
| | | GSDIQMTQSPSSLSASVGDRVTITCKAREKLWSAVAWYQQKPGKAPKsLIYSASF |
| | | RYSGVPSRFSGSGSGTDFTLTISSLQPEDFATYYCQQYYTYPYTFGGGTKVEIK** |
| 396 | ACP338 | aptssstkktqlqlehllldlqmilnginnyknpkltrmltfkfympkkatelkhlqcleeelkpleevlnlaqsknfhlrprdli |
| | | sninvivlelkgsettfmceyadetativeflnrwitfcqsiistltsggpGPAGLYAQpgsEVQLVESGGGLV |
| | | QPGNSLRLSCAASGFTFSKFGMSWVRQAPGKGLEWVSSISGSGRDTLYAESVKG |
| | | RFTISRDNAKTTLYLQMNSLRPEDTAVYYCTIGGSLSVSSQGTLVTVSSggggsgggg |
| | | sggggsggggsggggsggggssggpGPAGLYAQpgsEVQLVESGGGLVQPGGSLRLSCAAS |
| | | GFTFSSYTLAWVRQAPGKGLEWVAAIDSSSYTYSPDTVRGRFTISRDNAKNSLY |
| | | LQMNSLRAEDTAVYYCARDSNWDALDYWGQGTTVTVSSsggpGPAGLYAQpgsD |
| | | IQMTQSPSSLSASVGDRVTITCKVTEKVWGNVAWYQQKPGKAPISLIYSPSLRKS |
| | | GVPSRFSGSGSGTDFTLTISSLQPEDFATYYCQQYYTYPYTFGGGTKVEIK** |
| 397 | ACP339 | aptssstkktqlqlehllldlqmilnginnyknpkltrmltfkfympkkatelkhlqcleeelkpleevlnlaqsknfhlrprdli |
| | | sninvivlelkgsettfmceyadetativeflnrwitfcqsiistltsggpGPAGLYAQpgsEVQLVESGGGLV |
| | | QPGNSLRLSCAASGFTFSKFGMSWVRQAPGKGLEWVSSISGSGRDTLYAESVKG |
| | | RFTISRDNAKTTLYLQMNSLRPEDTAVYYCTIGGSLSVSSQGTLVTVSSggggsgggg |
| | | sggggsggggsggggsggggssggpGPAGLYAQpgsEVQLVESGGGLVQPGGSLRLSCAAS |
| | | GFTFSSYTLAWVRQAPGKGLEWVAAIDSSSYTYSPDTVRGRFTISRDNAKNSLY |
| | | LQMNSLRAEDTAVYYCARDSNWDALDYWGQGTTVTVSSGGGGSGGGGSGGG |
| | | GSDIQMTQSPSSLSASVGDRVTITCKVTEKVWGNVAWYQQKPGKAPISLIYSPSL |
| | | RKSGVPSRFSGSGSGTDFTLTISSLQPEDFATYYCQQYYTYPYTFGGGTKVEIK** |
| 398 | ACP340 | aptssstkktqlqlehllldlqmilnginnyknpkltrmltfkfympkkatelkhlqcleeelkpleevlnlaqsknfhlrprdli |
| | | sninvivlelkgsettfmceyadetativeflnrwitfcqsiistltsggpGPAGLYAQpgsEVQLVESGGGLV |
| | | QPGNSLRLSCAASGFTFSKFGMSWVRQAPGKGLEWVSSISGSGRDTLYAESVKG |
| | | RFTISRDNAKTTLYLQMNSLRPEDTAVYYCTIGGSLSVSSQGTLVTVSSggggsgggg |
| | | sggggsggggsggggsggggssggpGPAGLYAQpgsevqllesggglvqpggslrlscaasgsifsanamgwyrq |
| | | apgkglelvavissggstnyadsvkgrftisrdnskntvylqmnslraedtavyycmysgsyyytpndywgqgtlvtvss* |
| | | * |
| 399 | ACP341 | aptssstkktqlqlehllldlqmilnginnyknpkltrmltfkfympkkatelkhlqcleeelkpleevlnlaqsknfhlrprdli |
| | | sninvivlelkgsettfmceyadetativeflnrwitfcqsiistltsggpGPAGLYAQpgsEVQLVESGGGLV |
| | | QPGNSLRLSCAASGFTFSKFGMSWVRQAPGKGLEWVSSISGSGRDTLYAESVKG |
| | | RFTISRDNAKTTLYLQMNSLRPEDTAVYYCTIGGSLSVSSQGTLVTVSSggggsgggg |
| | | sggggsggggsggggsggggssggpGPAGLYAQpgsevqllesggglvqpggslrlscaaserifstdvmgwyrq |
| | | apgkqrelvavvsargttnyldavkgrftisrdnskntlylqmnslraedtavyycyvrettspwriywgqgtlvtvss** |
| 400 | ACP342 | elcdddppeiphatfkamaykegtmlnceckrgfrriksgslymlctgnsshsswdnqcqctssatrnttkqvtpqpeeqk |
| | | erkttemqspmqpvdqaslpghcrepppweneateriyhfvvgqmvyyqcvqgyralhrgpaesvckmthgktrwtq |
| | | pqlictgemetsqfpgeekpqaspegrpesetsSlvtttdfqiqtemaatmetsiftteyqggggsggggsggggsggggs |
| | | ggggsggggssggpGPAGLYAQpgsaptssstkktqlqlehllldlqmilnginnyknpkltrmltfkfympkkatel |
| | | khlqcleeelkpleevlnlaqsknfhlrprdlisninvivlelkgsettfmceyadetativeflnrwitfcqsiistltsggpGP |
| | | AGLYAQpgsEVQLVESGGGLVQPGNSLRLSCAASGFTFSKFGMSWVRQAPGKGL |
| | | EWVSSISGSGRDTLYAESVKGRFTISRDNAKTTLYLQMNSLRPEDTAVYYCTIGG |
| | | SLSVSSQGTLVTVSSggggsggggsggggsggggsggggsggggssggpGPAGLYAQpgsEVQL |
| | | VESGGGLVQPGGSLRLSCAASGFTFSSYTLAWVRQAPGKGLEWVAAIDSSSYTY |
| | | SPDTVRGRFTISRDNAKNSLYLQMNSLRAEDTAVYYCARDSNWDALDYWGQG |
| | | TTVTVSSsggpGPAGLYAQpgsDIQMTQSPSSLSASVGDRVTITCKAREKLWSAVA |
| | | WYQQKPGKAPKsLIYSASFRYSGVPSRFSGSGSGTDFTLTISSLQPEDFATYYCQQ |
| | | YYTYPYTFGGGTKVEIK** |
| 401 | ACP343 | elcdddppeiphatfkamaykegtmlnceckrgfrriksgslymlctgnsshsswdnqcqctssatrnttkqvtpqpeeqk |
| | | erkttemqspmqpvdqaslpghcrepppweneateriyhfvvgqmvyyqcvqgyralhrgpaesvckmthgktrwtq |
| | | pqlictgemetsqfpgeekpqaspegrpesetsSlvtttdfqiqtemaatmetsiftteyqggggsggggsggggsggggs |
| | | ggggsggggssggpGPAGLYAQpgsaptssstkktqlqlehllldlqmilnginnyknpkltrmltfkfympkkatel |
| | | khlqcleeelkpleevlnlaqsknfhlrprdlisninvivlelkgsettfmceyadetativeflnrwitfcqsiistltsggpGP |
| | | AGLYAQpgsEVQLVESGGGLVQPGNSLRLSCAASGFTFSKFGMSWVRQAPGKGL |
| | | EWVSSISGSGRDTLYAESVKGRFTISRDNAKTTLYLQMNSLRPEDTAVYYCTIGG |
| | | SLSVSSQGTLVTVSSggggsggggsggggsggggsggggsggggssggpGPAGLYAQpgsEVQL |
| | | VESGGGLVQPGGSLRLSCAASGFTFSSYTLAWVRQAPGKGLEWVAAIDSSSYTY |
| | | SPDTVRGRFTISRDNAKNSLYLQMNSLRAEDTAVYYCARDSNWDALDYWGQG |
| | | TTVTVSSGGGGSGGGGSGGGGSDIQMTQSPSSLSASVGDRVTITCKAREKLWSA |
| | | VAWYQQKPGKAPKsLIYSASFRYSGVPSRFSGSGSGTDFTLTISSLQPEDFATYYC |
| | | QQYYTYPYTFGGGTKVEIK** |
| 402 | ACP344 | elcdddppeiphatfkamaykegtmlnceckrgfrriksgslymlctgnsshsswdnqcqctssatrnttkqvtpqpeeqk |
| | | erkttemqspmqpvdqaslpghcrepppweneateriyhfvvgqmvyyqcvqgyralhrgpaesvckmthgktrwtq |
| | | pqlictgemetsqfpgeekpqaspegrpesetsSlvtttdfqiqtemaatmetsiftteyqggggsggggsggggsggggs |
| | | ggggsggggssggpGPAGLYAQpgsaptssstkktqlqlehllldlqmilnginnyknpkltrmltfkfympkkatel |
| | | khlqcleeelkpleevlnlaqsknfhlrprdlisninvivlelkgsettfmceyadetativeflnrwitfcqsiistltsggpGP |
| | | AGLYAQpgsEVQLVESGGGLVQPGNSLRLSCAASGFTFSKFGMSWVRQAPGKGL |
| | | EWVSSISGSGRDTLYAESVKGRFTISRDNAKTTLYLQMNSLRPEDTAVYYCTIGG |
| | | SLSVSSQGTLVTVSSggggsggggsggggsggggsggggsggggssggpGPAGLYAQpgsEVQL |
| | | VESGGGLVQPGGSLRLSCAASGFTFSSYTLAWVRQAPGKGLEWVAAIDSSSYTY |
| | | SPDTVRGRFTISRDNAKNSLYLQMNSLRAEDTAVYYCARDSNWDALDYWGQG |
| | | TTVTVSSsggpGPAGLYAQpgsDIQMTQSPSSLSASVGDRVTITCKVTEKVWGNVA |
| | | WYQQKPGKAPISLIYSPSLRKSGVPSRFSGSGSGTDFTLTISSLQPEDFATYYCQQ |
| | | YYTYPYTFGGGTKVEIK** |
| 403 | ACP345 | elcdddppeiphatfkamaykegtmlnceckrgfrriksgslymlctgnsshsswdnqcqctssatrnttkqvtpqpeeqk |
| | | erkttemqspmqpvdqaslpghcrepppweneateriyhfvvgqmvyyqcvqgyralhrgpaesvckmthgktrwtq |
| | | pqlictgemetsqfpgeekpqaspegrpesetsSlvtttdfqiqtemaatmetsiftteyqggggsggggsggggsggggs |
| | | ggggsggggssggpGPAGLYAQpgsaptssstkktqlqlehllldlqmilnginnyknpkltrmltfkfympkkatel |
| | | khlqcleeelkpleevlnlaqsknfhlrprdlisninvivlelkgsettfmceyadetativeflnrwitfcqsiistltsggpGP |
| | | AGLYAQpgsEVQLVESGGGLVQPGNSLRLSCAASGFTFSKFGMSWVRQAPGKGL |
| | | EWVSSISGSGRDTLYAESVKGRFTISRDNAKTTLYLQMNSLRPEDTAVYYCTIGG |
| | | SLSVSSQGTLVTVSSggggsggggsggggsggggsggggsggggssggpGPAGLYAQpgsEVQL |
| | | VESGGGLVQPGGSLRLSCAASGFTFSSYTLAWVRQAPGKGLEWVAAIDSSSYTY |
| | | SPDTVRGRFTISRDNAKNSLYLQMNSLRAEDTAVYYCARDSNWDALDYWGQG |
| | | TTVTVSSGGGGSGGGGSGGGGSDIQMTQSPSSLSASVGDRVTITCKVTEKVWGN |
| | | VAWYQQKPGKAPISLIYSPSLRKSGVPSRFSGSGSGTDFTLTISSLQPEDFATYYC |
| | | QQYYTYPYTFGGGTKVEIK** |
| 404 | ACP346 | elcdddppeiphatfkamaykegtmlnceckrgfrriksgslymlctgnsshsswdnqcqctssatrnttkqvtpqpeeqk |
| | | erkttemqspmqpvdqaslpghcrepppweneateriyhfvvgqmvyyqcvqgyralhrgpaesvckmthgktrwtq |
| | | pqlictgemetsqfpgeekpqaspegrpesetsSlvtttdfqiqtemaatmetsiftteyqggggsggggsggggsggggs |
| | | ggggsggggssggpGPAGLYAQpgsaptssstkktqlqlehllldlqmilnginnyknpkltrmltfkfympkkatel |
| | | khlqcleeelkpleevlnlaqsknfhlrprdlisninvivlelkgsettfmceyadetativeflnrwitfcqsiistltsggpGP |
| | | AGLYAQpgsEVQLVESGGGLVQPGNSLRLSCAASGFTFSKFGMSWVRQAPGKGL |
| | | EWVSSISGSGRDTLYAESVKGRFTISRDNAKTTLYLQMNSLRPEDTAVYYCTIGG |
| | | SLSVSSQGTLVTVSSggggsggggsggggsggggsggggsggggssggpGPAGLYAQpgsevqlles |
| | | ggglvqpggslrlscaasgsifsanamgwyrqapgkglelvavissggstnyadsvkgrftisrdnskntvylqmnslraed |
| | | tavyycmysgsyyytpndywgqgtlvtvss** |
| 405 | ACP347 | elcdddppeiphatfkamaykegtmlnceckrgfrriksgslymlctgnsshsswdnqcqctssatrnttkqvtpqpeeqk |
| | | erkttemqspmqpvdqaslpghcrepppweneateriyhfvvgqmvyyqcvqgyralhrgpaesvckmthgktrwtq |
| | | pqlictgemetsqfpgeekpqaspegrpesetsSlvtttdfqiqtemaatmetsiftteyqggggsggggsggggsggggs |
| | | ggggsggggssggpGPAGLYAQpgsaptssstkktqlqlehllldlqmilnginnyknpkltrmltfkfympkkatel |
| | | khlqcleeelkpleevlnlaqsknfhlrprdlisninvivlelkgsettfmceyadetativeflnrwitfcqsiistltsggpGP |
| | | AGLYAQpgsEVQLVESGGGLVQPGNSLRLSCAASGFTFSKFGMSWVRQAPGKGL |
| | | EWVSSISGSGRDTLYAESVKGRFTISRDNAKTTLYLQMNSLRPEDTAVYYCTIGG |
| | | SLSVSSQGTLVTVSSggggsggggsggggsggggsggggsggggssggpGPAGLYAQpgsevqlles |
| | | ggglyqpggslrlscaaserifstdvmgwyrqapgkqrelvavvsargttnyldavkgrftisrdnskntlylqmnslraedt |
| | | avyycyvrettspwriywgqgtlvtvss** |
| 406 | ACP348 | eskygppcppcpapeflggpsvflfppkpkdtlmisrtpevtcvvvdvsqedpevqfnwyvdgvevhnaktkpreeqf |
| | | nstyrvvsvltvlhqdwlngkeykckvsnkglpssiektiskakgqprepqvytlppsqeemtknqvsltclvkgfypsdi |
| | | avewesngqpennykttppvldsdgsfflysrltvdksrwqegnvfscsvmhealhnhytqkslslslgksggpGPAG |
| | | LYAQpgsaptssstkktqlqlehllldlqmilnginnyknpkltrmltfkfympkkatelkhlqcleeelkpleevlnlaqs |
| | | knfhlrprdlisninvivlelkgsettfmceyadetativeflnrwitfcqsiistltggggsggggsggggsggggsggggsg |
| | | gggssggpGPAGLYAQpgsEVQLVESGGGLVQPGGSLRLSCAASGFTFSSYTLAWVR |
| | | QAPGKGLEWVAAIDSSSYTYSPDTVRGRFTISRDNAKNSLYLQMNSLRAEDTAV |
| | | YYCARDSNWDALDYWGQGTTVTVSSsggpGPAGLYAQpgsDIQMTQSPSSLSASV |
| | | GDRVTITCKAREKLWSAVAWYQQKPGKAPKsLIYSASFRYSGVPSRFSGSGSGT |
| | | DFTLTISSLQPEDFATYYCQQYYTYPYTFGGGTKVEIK** |
| 407 | ACP349 | eskygppcppcpapeflggpsvflfppkpkdtlmisrtpevtcvvvdvsqedpevqfnwyvdgvevhnaktkpreeqf |
| | | nstyrvvsvltvlhqdwlngkeykckvsnkglpssiektiskakgqprepqvytlppsqeemtknqvsltclykgfypsdi |
| | | avewesngqpennykttppvldsdgsfflysrltvdksrwqegnvfscsvmhealhnhytqkslslslgksggpGPAG |
| | | LYAQpgsaptssstkktqlqlehllldlqmilnginnyknpkltrmltfkfympkkatelkhlqcleeelkpleevlnlaqs |
| | | knfhlrprdlisninvivlelkgsettfmceyadetativeflnrwitfcqsiistltggggsggggsggggsggggsggggsg |
| | | gggssggpGPAGLYAQpgsEVQLVESGGGLVQPGGSLRLSCAASGFTFSSYTLAWVR |
| | | QAPGKGLEWVAAIDSSSYTYSPDTVRGRFTISRDNAKNSLYLQMNSLRAEDTAV |
| | | YYCARDSNWDALDYWGQGTTVTVSSGGGGSGGGGSGGGGSDIQMTQSPSSLS |
| | | ASVGDRVTITCKAREKLWSAVAWYQQKPGKAPKsLIYSASFRYSGVPSRFSGSG |
| | | SGTDFTLTISSLQPEDFATYYCQQYYTYPYTFGGGTKVEIK** |
| 408 | ACP350 | eskygppcppcpapeflggpsvflfppkpkdtlmisrtpevtcvvvdvsqedpevqfnwyvdgvevhnaktkpreeqf |
| | | nstyrvvsvltvlhqdwlngkeykckvsnkglpssiektiskakgqprepqvytlppsqeemtknqvsltclvkgfypsdi |
| | | avewesngqpennykttppvldsdgsfflysrltvdksrwqegnvfscsvmhealhnhytqkslslslgksggpGPAG |
| | | LYAQpgsaptssstkktqlqlehllldlqmilnginnyknpkltrmltfkfympkkatelkhlqcleeelkpleevlnlaqs |
| | | knfhlrprdlisninvivlelkgsettfmceyadetativeflnrwitfcqsiistltggggsggggsggggsggggsggggsg |
| | | gggssggpGPAGLYAQpgsEVQLVESGGGLVQPGGSLRLSCAASGFTFSSYTLAWVR |
| | | QAPGKGLEWVAAIDSSSYTYSPDTVRGRFTISRDNAKNSLYLQMNSLRAEDTAV |
| | | YYCARDSNWDALDYWGQGTTVTVSSsggpGPAGLYAQpgsDIQMTQSPSSLSASV |
| | | GDRVTITCKVTEKVWGNVAWYQQKPGKAPISLIYSPSLRKSGVPSRFSGSGSGT |
| | | DFTLTISSLQPEDFATYYCQQYYTYPYTFGGGTKVEIK** |
| 409 | ACP351 | eskygppcppcpapeflggpsvflfppkpkdtlmisrtpevtcvvvdvsqedpevqfnwyvdgvevhnaktkpreeqf |
| | | nstyrvvsvltvlhqdwlngkeykckvsnkglpssiektiskakgqprepqvytlppsqeemtknqvsltclvkgfypsdi |
| | | avewesngqpennykttppvldsdgsfflysrltvdksrwqegnvfscsvmhealhnhytqkslslslgksggpGPAG |
| | | LYAQpgsaptssstkktqlqlehllldlqmilnginnyknpkltrmltfkfympkkatelkhlqcleeelkpleevlnlaqs |
| | | knfhlrprdlisninvivlelkgsettfmceyadetativeflnrwitfcqsiistltggggsggggsggggsggggsggggsg |
| | | gggssggpGPAGLYAQpgsEVQLVESGGGLVQPGGSLRLSCAASGFTFSSYTLAWVR |
| | | QAPGKGLEWVAAIDSSSYTYSPDTVRGRFTISRDNAKNSLYLQMNSLRAEDTAV |
| | | YYCARDSNWDALDYWGQGTTVTVSSGGGGSGGGGSGGGGSDIQMTQSPSSLS |
| | | ASVGDRVTITCKVTEKVWGNVAWYQQKPGKAPISLIYSPSLRKSGVPSRFSGSGS |
| | | GTDFTLTISSLQPEDFATYYCQQYYTYPYTFGGGTKVEIK** |
| 410 | ACP352 | eskygppcppcpapeflggpsvflfppkpkdtlmisrtpevtcvvvdvsqedpevqfnwyvdgvevhnaktkpreeqf |
| | | nstyrvvsvltvlhqdwlngkeykckvsnkglpssiektiskakgqprepqvytlppsqeemtknqvsltclvkgfypsdi |
| | | avewesngqpennykttppvldsdgsfflysrltvdksrwqegnvfscsvmhealhnhytqkslslslgksggpGPAG |
| | | LYAQpgsaptssstkktqlqlehllldlqmilnginnyknpkltrmltfkfympkkatelkhlqcleeelkpleevlnlaqs |
| | | knfhlrprdlisninvivlelkgsettfmceyadetativeflnrwitfcqsiistltggggsggggsggggsggggsggggsg |
| | | gggssggpGPAGLYAQpgsevqllesggglvqpggslrlscaasgsifsanamgwyrqapgkglelvavissggst |
| | | nyadsvkgrftisrdnskntvylqmnslraedtavyycmysgsyyytpndywgqgtlvtvss** |
| 411 | ACP353 | eskygppcppcpapeflggpsvflfppkpkdtlmisrtpevtcvvvdvsqedpevqfnwyvdgvevhnaktkpreeqf |
| | | nstyrvvsvltvlhqdwlngkeykckvsnkglpssiektiskakgqprepqvytlppsqeemtknqvsltclvkgfypsdi |
| | | avewesngqpennykttppvldsdgsfflysrltvdksrwqegnvfscsvmhealhnhytqkslslslgksggpGPAG |
| | | LYAQpgsaptssstkktqlqlehllldlqmilnginnyknpkltrmltfkfympkkatelkhlqcleeelkpleevlnlaqs |
| | | knfhlrprdlisninvivlelkgsettfmceyadetativeflnrwitfcqsiistltggggsggggsggggsggggsggggsg |
| | | gggssggpGPAGLYAQpgsevqllesggglvqpggslrlscaaserifstdvmgwyrqapgkqrelvavvsargttn |
| | | yldavkgrftisrdnskntlylqmnslraedtavyycyvrettspwriywgqgtlvtvss** |
| 412 | ACP354 | eskygppcppcpapeflggpsvflfppkpkdtlmisrtpevtcvvvdvsqedpevqfnwyvdgvevhnaktkpreeqf |
| | | nstyrvvsvltvlhqdwlngkeykckvsnkglpssiektiskakgqprepqvytlppsqeemtknqvsltclvkgfypsdi |
| | | avewesngqpennykttppvldsdgsfflysrltvdksrwqegnvfscsvmhealhnhytqkslslslgksggpGPAG |
| | | LYAQpgselcdddppeiphatfkamaykegtmlnceckrgfrriksgslymlctgnsshsswdnqcqctssatrnttkq |
| | | vtpqpeeqkerkttemqspmqpvdqaslpghcrepppweneateriyhfvvgqmvyyqcvqgyralhrgpaesvck |
| | | mthgktrwtqpqlictgemetsqfpgeekpqaspegrpesetsSlvtttdfqiqtemaatmetsiftteyqggggsggggsg |
| | | gggsggggsggggsggggssggpGPAGLYAQpgsaptssstkktqlqlehllldlqmilnginnyknpkltrmltfk |
| | | fympkkatelkhlqcleeelkpleevlnlaqsknfhlrprdlisninvivlelkgsettfmceyadetativeflnrwitfcqsiis |
| | | tltggggsggggsggggsggggsggggsggggssggpGPAGLYAQpgsEVQLVESGGGLVQPGGS |
| | | LRLSCAASGFTFSSYTLAWVRQAPGKGLEWVAAIDSSSYTYSPDTVRGRFTISRD |
| | | NAKNSLYLQMNSLRAEDTAVYYCARDSNWDALDYWGQGTTVTVSSsggpGPAG |
| | | LYAQpgsDIQMTQSPSSLSASVGDRVTITCKAREKLWSAVAWYQQKPGKAPKsLI |
| | | YSASFRYSGVPSRFSGSGSGTDFTLTISSLQPEDFATYYCQQYYTYPYTFGGGTK |
| | | VEIK** |
| 413 | ACP355 | eskygppcppcpapeflggpsvflfppkpkdtlmisrtpevtcvvvdvsqedpevqfnwyvdgvevhnaktkpreeqf |
| | | nstyrvvsvltvlhqdwlngkeykckvsnkglpssiektiskakgqprepqvytlppsqeemtknqvsltclvkgfypsdi |
| | | avewesngqpennykttppvldsdgsfflysrltvdksrwqegnvfscsvmhealhnhytqkslslslgksggpGPAG |
| | | LYAQpgselcdddppeiphatfkamaykegtmlnceckrgfrriksgslymlctgnsshsswdnqcqctssatmttkq |
| | | vtpqpeeqkerkttemqspmqpvdqaslpghcrepppweneateriyhfvvgqmvyyqcvqgyralhrgpaesvck |
| | | mthgktrwtqpqlictgemetsqfpgeekpqaspegrpesetsSlvtttdfqiqtemaatmetsiftteyqggggsggggsg |
| | | gggsggggsggggsggggssggpGPAGLYAQpgsaptssstkktqlqlehllldlqmilnginnyknpkltrmltfk |
| | | fympkkatelkhlqcleeelkpleevlnlaqsknfhlrprdlisninvivlelkgsettfmceyadetativeflnrwitfcqsiis |
| | | tltggggsggggsggggsggggsggggsggggssggpGPAGLYAQpgsEVQLVESGGGLVQPGGS |
| | | LRLSCAASGFTFSSYTLAWVRQAPGKGLEWVAAIDSSSYTYSPDTVRGRFTISRD |
| | | NAKNSLYLQMNSLRAEDTAVYYCARDSNWDALDYWGQGTTVTVSSGGGGSG |
| | | GGGSGGGGSDIQMTQSPSSLSASVGDRVTITCKAREKLWSAVAWYQQKPGKAP |
| | | KsLIYSASFRYSGVPSRFSGSGSGTDFTLTISSLQPEDFATYYCQQYYTYPYTFGG |
| | | GTKVEIK** |
| 414 | ACP356 | eskygppcppcpapeflggpsvflfppkpkdtlmisrtpevtcvvvdvsqedpevqfnwyvdgvevhnaktkpreeqf |
| | | nstyrvvsvltvlhqdwlngkeykckvsnkglpssiektiskakgqprepqvytlppsqeemtknqvsltclvkgfypsdi |
| | | avewesngqpennykttppvldsdgsfflysrltvdksrwqegnvfscsvmhealhnhytqkslslslgksggpGPAG |
| | | LYAQpgselcdddppeiphatfkamaykegtmlnceckrgfrriksgslymlctgnsshsswdnqcqctssatrnttkq |
| | | vtpqpeeqkerkttemqspmqpvdqaslpghcrepppweneateriyhfvvgqmvyyqcvqgyralhrgpaesyck |
| | | mthgktrwtqpqlictgemetsqfpgeekpqaspegrpesetsSlvtttdfqiqtemaatmetsiftteyqggggsggggsg |
| | | gggsggggsggggsggggssggpGPAGLYAQpgsaptssstkktqlqlehllldlqmilnginnyknpkltrmltfk |
| | | fympkkatelkhlqcleeelkpleevlnlaqsknfhlrprdlisninvivlelkgsettfmceyadetativeflnrwitfcqsiis |
| | | tltggggsggggsggggsggggsggggsggggssggpGPAGLYAQpgsEVQLVESGGGLVQPGGS |
| | | LRLSCAASGFTFSSYTLAWVRQAPGKGLEWVAAIDSSSYTYSPDTVRGRFTISRD |
| | | NAKNSLYLQMNSLRAEDTAVYYCARDSNWDALDYWGQGTTVTVSSsggpGPAG |
| | | LYAQpgsDIQMTQSPSSLSASVGDRVTITCKVTEKVWGNVAWYQQKPGKAPISLI |
| | | YSPSLRKSGVPSRFSGSGSGTDFTLTISSLQPEDFATYYCQQYYTYPYTFGGGTK |
| | | VEIK** |
| 415 | ACP357 | eskygppcppcpapeflggpsvflfppkpkdtlmisrtpevtcvvvdvsqedpevqfnwyvdgvevhnaktkpreeqf |
| | | nstyrvvsvltvlhqdwlngkeykckvsnkglpssiektiskakgqprepqvytlppsqeemtknqvsltclykgfypsdi |
| | | avewesngqpennykttppyldsdgsfflysrltvdksrwqegnyfscsvmhealhnhytqkslslslgksggpGPAG |
| | | LYAQpgselcdddppeiphatfkamaykegtmlnceckrgfrriksgslymlctgnsshsswdnqcqctssatrnttkq |
| | | vtpqpeeqkerkttemqspmqpvdqaslpghcrepppweneateriyhfvvgqmvyyqcvqgyralhrgpaesvck |
| | | mthgktrwtqpqlictgemetsqfpgeekpqaspegrpesetsSlvtttdfqiqtemaatmetsiftteyqggggsggggsg |
| | | gggsggggsggggsggggssggpGPAGLYAQpgsaptssstkktqlqlehllldlqmilnginnyknpkltrmltfk |
| | | fympkkatelkhlqcleeelkpleevlnlaqsknfhlrprdlisninvivlelkgsettfmceyadetativeflnrwitfcqsiis |
| | | tltggggsggggsggggsggggsggggsggggssggpGPAGLYAQpgsEVQLVESGGGLVQPGGS |
| | | LRLSCAASGFTFSSYTLAWVRQAPGKGLEWVAAIDSSSYTYSPDTVRGRFTISRD |
| | | NAKNSLYLQMNSLRAEDTAVYYCARDSNWDALDYWGQGTTVTVSSGGGGSG |
| | | GGGSGGGGSDIQMTQSPSSLSASVGDRVTITCKVTEKVWGNVAWYQQKPGKAP |
| | | ISLIYSPSLRKSGVPSRFSGSGSGTDFTLTISSLQPEDFATYYCQQYYTYPYTFGGG |
| | | TKVEIK** |
| 416 | ACP358 | eskygppcppcpapeflggpsvflfppkpkdtlmisrtpevtcvvvdvsqedpevqfnwyvdgvevhnaktkpreeqf |
| | | nstyrvvsvltvlhqdwlngkeykckvsnkglpssiektiskakgqprepqvytlppsqeemtknqvsltclvkgfypsdi |
| | | avewesngqpennykttppvldsdgsfflysrltvdksrwqegnvfscsvmhealhnhytqkslslslgksggpGPAG |
| | | LYAQpgselcdddppeiphatfkamaykegtmlnceckrgfrriksgslymlctgnsshsswdnqcqctssatrnttkq |
| | | vtpqpeeqkerkttemqspmqpvdqaslpghcrepppweneateriyhfvvgqmvyyqcvqgyralhrgpaesvck |
| | | mthgktrwtqpqlictgemetsqfpgeekpqaspegrpesetsSlvtttdfqiqtemaatmetsiftteyqggggsggggsg |
| | | gggsggggsggggsggggssggpGPAGLYAQpgsaptssstkktqlqlehllldlqmilnginnyknpkltrmltfk |
| | | fympkkatelkhlqcleeelkpleevlnlaqsknfhlrprdlisninvivlelkgsettfmceyadetativeflnrwitfcqsiis |
| | | tltggggsggggsggggsggggsggggsggggssggpGPAGLYAQpgsevqllesggglvqpggslrlscaasgsi |
| | | fsanamgwyrqapgkglelvavissggstnyadsvkgrftisrdnskntvylqmnslraedtavyycmysgsyyytpnd |
| | | ywgqgtlvtvss** |
| 417 | ACP359 | eskygppcppcpapeflggpsvflfppkpkdtlmisrtpevtcvvvdvsqedpevqfnwyvdgvevhnaktkpreeqf |
| | | nstyrvvsvltvlhqdwlngkeykckvsnkglpssiektiskakgqprepqvytlppsqeemtknqvsltclvkgfypsdi |
| | | avewesngqpennykttppvldsdgsfflysrltvdksrwqegnvfscsvmhealhnhytqkslslslgksggpGPAG |
| | | LYAQpgselcdddppeiphatfkamaykegtmlnceckrgfrriksgslymlctgnsshsswdnqcqctssatrnttkq |
| | | vtpqpeeqkerkttemqspmqpvdqaslpghcrepppweneateriyhfvvgqmvyyqcvqgyralhrgpaesvck |
| | | mthgktrwtqpqlictgemetsqfpgeekpqaspegrpesetsSlvtttdfqiqtemaatmetsiftteyqggggsggggsg |
| | | gggsggggsggggsggggssggpGPAGLYAQpgsaptssstkktqlqlehllldlqmilnginnyknpkltrmltfk |
| | | fympkkatelkhlqcleeelkpleevlnlaqsknfhlrprdlisninvivlelkgsettfmceyadetativeflnrwitfcqsiis |
| | | tltggggsggggsggggsggggsggggsggggssggpGPAGLYAQpgsevqllesggglyqpggslrlscaaserif |
| | | stdvmgwyrqapgkqrelvavvsargttnyldavkgrftisrdnskntlylqmnslraedtavyycyvrettspwriywgq |
| | | gtlvtvss** |
| 418 | ACP360 | EVQLVESGGGLVQPGGSLRLSCAASGFTFSSYTLAWVRQAPGKGLEWVAAIDSS |
| | | SYTYSPDTVRGRFTISRDNAKNSLYLQMNSLRAEDTAVYYCARDSNWDALDYW |
| | | GQGTTVTVSSggggsggggsggggsDIQMTQSPSSLSASVGDRVTITCKASQNVGTNV |
| | | GWYQQKPGKAPKsLIYSASFRYSGVPSRFSGSGSGTDFTLTISSLQPEDFATYYCQ |
| | | QYYTYPYTFGGGTKVEIKHHHHHH** |
| 419 | ACP361 | EVQLVESGGGLVQPGGSLRLSCAASGFTFSSYTLAWVRQAPGKGLEWVAAIDSS |
| | | SYTYSPDTVRGRFTISRDNAKNSLYLQMNSLRAEDTAVYYCARDSNWDALDYW |
| | | GQGTTVTVSSsggpGPAGLYAQpgsDIQMTQSPSSLSASVGDRVTITCKASQNVGT |
| | | NVGWYQQKPGKAPKALIYSASFRYSGVPSRFSGSGSGTDFTLTISSLQPEDFATY |
| | | YCQQYYTYPYTFGGGTKVEIKHHHHHH** |
| 420 | ACP362 | EVQLVESGGGLVQPGGSLRLSCAASGFTFSSYTLAWVRQAPGKGLEWVAAIDSS |
| | | SYTYSPDTVRGRFTISRDNAKNSLYLQMNSLRAEDTAVYYCARDSNWDALDYW |
| | | GQGTTVTVSSsggpGPAGLYAQpgsDIQMTQSPSSLSASVGDRVTITCKASQNVGT |
| | | NVGWYQQKPGKAPKsLIYSASFRYSGVPSRFSGSGSGTDFTLTISSLQPEDFATYY |
| | | CQQYYTYPYTFGGGTKVEIKHHHHHH** |
| 421 | ACP200 | lveepknlvktncdlyeklgeygfqnailvrytqkapqvstptlveaarnlgrvgtkcctlpedqrlpcvedylsail |
| | | nrvcllhektpvsehvtkccsgslverrpcfsaltvdetyvpkefkaetftfhsdictlpekekqikkqtalaelvkh |
| | | kpkataeqlktvmddfaqfldtcckaadkdtcfstegpnlvtrckdalaSGGPGPAGMKGLPGScdlp |
| | | qthnlrnkraltllvqmrrlsplsclkdrkdfgfpqekvdaqqikkapipvlseltqqilniftskdssaawnttlld |
| | | sfcndlhqqlndlqgclmqqvgvqefpltqedallavrkyfhritvylrekkhspcawevvraevwralsssan |
| | | vlgrlreekSGGPGPAGMKGLPGSlveepknlvktncdlyeklgeygfqnailvrytqkapqvstptl |
| | | veaarnlgrvgtkcctlpedqrlpcvedylsailnrvcllhektpvsehytkccsgslverrpcfsaltvdetyvpke |
| | | fkaetftfhsdictlpekekqikkqtalaelvkhkpkataeqlktvmddfaqfldtcckaadkdtcfstegpnlvtrc |
| | | kdalaHHHHHH** |
| 422 | ACP201 | eahkseiahryndlgeqhfkglvliafsqylqkcsydehaklvqevtdfaktcvadesaancdkslhtlfgdklcaipnlren |
| | | ygeladcctkqepernecflqhkddnpslppferpeaeamctsfkenpttfmghylhevarrhpyfyapellyyaeqynei |
| | | ltqccaeadkescltpkldgykekalvssyrqGGGGSGGGGSGGSlveepknlvktncdlyeklgeygfqnailvr |
| | | ytqkapqvstptlveaarnlgrvgtkcctlpedqrlpcvedylsailnrycllhektpvsehvtkccsgslverrpcfsaltvdet |
| | | yypkefkaetftfhsdictlpekekqikkqtalaelvkhkpkataeqlktvmddfaqfldtcckaadkdtcfstegpnlvtrck |
| | | dalaSGGPGPAGMKGLPGScdlpqthnlmkraltllvqmrrlsplsclkdrkdfgfpqekvdaqqikkapipvl |
| | | seltqqilniftskdssaawnttlldsfcndlhqqlndlqgclmqqvgvqefpltqedallavrkyfhritvylrekkhspcaw |
| | | evvraevwralsssanvlgrlreekSGGPGPAGMKGLPGSeahkseiahryndlgeqhfkglvliafsqylqkcs |
| | | ydehaklvqevtdfaktcvadesaancdkslhtlfgdklcaipnlrenygeladcctkqepernecflqhkddnpslppfer |
| | | peaeamctsfkenpttfmghylhevarrhpyfyapellyyaeqyneiltqccaeadkescltpkldgykekalvssyrqG |
| | | GGGSGGGGSGGSlveepknlvktncdlyeklgeygfqnailvrytqkapqvstptlveaarnlgrvgtkcctlpedq |
| | | rlpcvedylsailnrvcllhektpvsehvtkccsgslverrpcfsaltvdetyvpkefkaetftfhsdictlpekekqikkqtala |
| | | elvkhkpkataeqlktvmddfaqfldtcckaadkdtcfstegpnlytrckdalaHHHHHH** |
| 423 | ACP202 | EVQLVESGGGLVQPGNSLRLSCAASGFTFSKFGMSWVRQAPGKGLEWVSSISGS |
| | | GRDTLYAESVKGRFTISRDNAKTTLYLQMNSLRPEDTAVYYCTIGGSLSVSSQGT |
| | | LVTVSSggggsgggSGGPGPAGMKGLPGSggggsgggscdlpqthnlrnkraltllvqmrrlsplsclkdrk |
| | | dfgfpqekvdaqqikkapipvlseltqqilniftskdssaawnttlldsfcndlhqqlndlqgclmqqvgvqefpltqedall |
| | | avrkyfhritvylrekkhspcawevvraevwralsssanvlgrlreekggggsgggSGGPGPAGMKGLPGSgg |
| | | ggsgggsEVQLVESGGGLVQPGNSLRLSCAASGFTFSKFGMSWVRQAPGKGLEWV |
| | | SSISGSGRDTLYAESVKGRFTISRDNAKTTLYLQMNSLRPEDTAVYYCTIGGSLS |
| | | VSSQGTLVTVSSHHHHHH** |
| 424 | ACP203 | EVQLVESGGGLVQPGNSLRLSCAASGFTFSKFGMSWVRQAPGKGLEWVSSISGS |
| | | GRDTLYAESVKGRFTISRDNAKTTLYLQMNSLRPEDTAVYYCTIGGSLSVSSQGT |
| | | LVTVSSsggpGPAGLYAQpgscdlpqthnlrnkraltllvqmrrlsplsclkdrkdfgfpqekvdaqqikkaqai |
| | | pvlseltqqilniftskdssaawnttlldsfcndlhqqlndlqgclmqqvgvqefpltqedallavrkyfhritvylrekkhspc |
| | | awevvraevwralsssanvlgrlreeksggpGPAGLYAQpgsEVQLVESGGGLVQPGNSLRLSCA |
| | | ASGFTFSKFGMSWVRQAPGKGLEWVSSISGSGRDTLYAESVKGRFTISRDNAKT |
| | | TLYLQMNSLRPEDTAVYYCTIGGSLSVSSQGTLVTVSS** |
| 425 | ACP204 | EVQLVESGGGLVQPGNSLRLSCAASGFTFSKFGMSWVRQAPGKGLEWVSSISGS |
| | | GRDTLYAESVKGRFTISRDNAKTTLYLQMNSLRPEDTAVYYCTIGGSLSVSSQGT |
| | | LVTVSSsggpALFKSSFPpgscdlpqthnlrnkraltllvqmrrlsplsclkdrkdfgfpqekvdaqqikkaqaipv |
| | | lseltqqilniftskdssaawnttlldsfcndlhqqlndlqgclmqqvgvqefpltqedallavrkyfhritvylrekkhspcaw |
| | | evvraevwralsssanvlgrlreeksggpALFKSSFPpgsEVQLVESGGGLVQPGNSLRLSCAAS |
| | | GFTFSKFGMSWVRQAPGKGLEWVSSISGSGRDTLYAESVKGRFTISRDNAKTTL |
| | | YLQMNSLRPEDTAVYYCTIGGSLSVSSQGTLVTVSS** |
| 426 | ACP205 | EVQLVESGGGLVQPGNSLRLSCAASGFTFSKFGMSWVRQAPGKGLEWVSSISGS |
| | | GRDTLYAESVKGRFTISRDNAKTTLYLQMNSLRPEDTAVYYCTIGGSLSVSSQGT |
| | | LVTVSSsggpPLAQKLKSSpgscdlpqthnlrnkraltllvqmrrlsplsclkdrkdfgfpqekvdaqqikkaqai |
| | | pvlseltqqilniftskdssaawnttlldsfcndlhqqlndlqgclmqqvgvqefpltqedallavrkyfhritvylrekkhspc |
| | | awevvraevwralsssanvlgrlreeksggpPLAQKLKSSpgsEVQLVESGGGLVQPGNSLRLSC |
| | | AASGFTFSKFGMSWVRQAPGKGLEWVSSISGSGRDTLYAESVKGRFTISRDNAK |
| | | TTLYLQMNSLRPEDTAVYYCTIGGSLSVSSQGTLVTVSS** |
| 427 | ACP206 | EVQLVESGGGLVQPGNSLRLSCAASGFTFSKFGMSWVRQAPGKGLEWVSSISGS |
| | | GRDTLYAESVKGRFTISRDNAKTTLYLQMNSLRPEDTAVYYCTIGGSLSVSSQGT |
| | | LVTVSSsggpGPAGLYAQpgscdlpqthslgsrrtlmllaqmrrislfsclkdrhdfgfpqeefgnqfqkaetipvl |
| | | hemiqqifnlfstkdssaawdetlldkfytelyqqlndleacviqgvgvtetplmkedsilavrkyfqritlylkekkyspca |
| | | wevvraeimrsfslstnlqeslrskesggpGPAGLYAQpgsEVQLVESGGGLVQPGNSLRLSCAA |
| | | SGFTFSKFGMSWVRQAPGKGLEWVSSISGSGRDTLYAESVKGRFTISRDNAKTT |
| | | LYLQMNSLRPEDTAVYYCTIGGSLSVSSQGTLVTVSS** |
| 428 | ACP207 | EVQLVESGGGLVQPGNSLRLSCAASGFTFSKFGMSWVRQAPGKGLEWVSSISGS |
| | | GRDTLYAESVKGRFTISRDNAKTTLYLQMNSLRPEDTAVYYCTIGGSLSVSSQGT |
| | | LVTVSSsggpALFKSSFPpgscdlpqthslgsrrtlmllaqmrrislfsclkdrhdfgfpqeefgnqfqkaetipvlh |
| | | emiqqifnlfstkdssaawdetlldkfytelyqqlndleacviqgvgvtetplmkedsilavrkyfqritlylkekkyspcaw |
| | | evvraeimrsfslstnlqeslrskesggpALFKSSFPpgsEVQLVESGGGLVQPGNSLRLSCAASG |
| | | FTFSKFGMSWVRQAPGKGLEWVSSISGSGRDTLYAESVKGRFTISRDNAKTTLY |
| | | LQMNSLRPEDTAVYYCTIGGSLSVSSQGTLVTVSS** |
| 429 | ACP208 | EVQLVESGGGLVQPGNSLRLSCAASGFTFSKFGMSWVRQAPGKGLEWVSSISGS |
| | | GRDTLYAESVKGRFTISRDNAKTTLYLQMNSLRPEDTAVYYCTIGGSLSVSSQGT |
| | | LVTVSSsggpPLAQKLKSSpgscdlpqthslgsrrtlmllaqmrrislfsclkdrhdfgfpqeefgnqfqkaetipv |
| | | lhemiqqifnlfstkdssaawdetlldkfytelyqqlndleacviqgvgvtetplmkedsilavrkyfqritlylkekkyspca |
| | | wevvraeimrsfslstnlqeslrskesggpPLAQKLKSSpgsEVQLVESGGGLVQPGNSLRLSCAA |
| | | SGFTFSKFGMSWVRQAPGKGLEWVSSISGSGRDTLYAESVKGRFTISRDNAKTT |
| | | LYLQMNSLRPEDTAVYYCTIGGSLSVSSQGTLVTVSS** |
| 430 | ACP211 | EVQLVESGGGLVQPGNSLRLSCAASGFTFSKFGMSWVRQAPGKGLEWVS |
| | | SISGSGRDTLYAESVKGRFTISRDNAKTTLYLQMNSLRPEDTAVYYCTIG |
| | | GSLSVSSQGTLVTVSSSGGPGPAGMKGLPGShgtviesleslnnyfnssgidveekslfldi |
| | | wrnwqkdgdmkilqsqiisfylrlfevlkdnqaisnnisvieshlittffsnskakkdafmsiakfevnnpqvqr |
| | | qafnelirvvhqllpesslrkrkrsrcSGGPGPAGMKGLPGScdlpqthnlrnkraltllvqmrrlsplsc |
| | | lkdrkdfgfpqekvdaqqikkapipvlseltqqilniftskdssaawnttlldsfcndlhqqlndlqgclmqqvg |
| | | vqefpltqedallavrkyfhritvylrekkhspcawevvraevwralsssanvlgrlreekSGGPGPAGM |
| | | KGLPGShgtviesleslnnyfnssgidveekslfldiwrnwqkdgdmkilqsqiisfylrlfevlkdnqaisnn |
| | | isvieshlittffsnskakkdafmsiakfevnnpqvqrqafnelirvvhqllpesslrkrkrsrcSGGPGPAG |
| | | MKGLPGSEVQLVESGGGLVQPGNSLRLSCAASGFTFSKFGMSWVRQAPG |
| | | KGLEWVSSISGSGRDTLYAESVKGRFTISRDNAKTTLYLQMNSLRPEDTA |
| | | VYYCTIGGSLSVSSQGTLVTVSSHEIREIREI |
| 431 | ACP213 | lveepknlvktncdlyeklgeygfqnailvrytqkapqvstptlveaarnlgrvgtkcctlpedqrlpcvedylsail |
| | | nrvcllhektpvsehvtkccsgslverrpcfsaltvdetyvpkefkaetftfhsdictlpekekqikkqtalaelvkh |
| | | kpkataeqlktvmddfaqfldtcckaadkdtcfstegpnlvtrckdalaSGGPGPAGMKGLPGShgt |
| | | viesleslnnyfnssgidveekslfldiwrnwqkdgdmkilqsqiisfylrlfevlkdnqaisnnisvieshlittffs |
| | | nskakkdafmsiakfevnnpqvqrqafnelirvvhqllpesslrkrkrsrcSGGPGPAGMKGLPGSlv |
| | | eepknlvktncdlyeklgeygfqnailvrytqkapqvstptlveaarnlgrvgtkcctlpedqrlpcvedylsailn |
| | | rvcllhektpvsehvtkccsgslverrpcfsaltvdetyvpkefkaetftfhsdictlpekekqikkqtalaelvkhk |
| | | pkataeqlktvmddfaqfldtcckaadkdtcfstegpnlvtrckdalaSGGPGPAGMKGLPGShgtvi |
| | | esleslnnyfnssgidveekslfldiwrnwqkdgdmkilqsqiisfylrlfevlkdnqaisnnisvieshlittffsns |
| | | kakkdafmsiakfevnnpqvqrqafnelirvvhqllpesslrkrkrsrcSGGPGPAGMKGLPGSlvee |
| | | pknlvktncdlyeklgeygfqnailvrytqkapqvstptlveaarnlgrvgtkcctlpedqrlpcvedylsailnrv |
| | | cllhektpvsehvtkccsgslverrpcfsaltvdetyvpkeflcaetftfhsdictlpekekqikkqtalaelvkhkpk |
| | | ataeqlktvmddfaqfldtcckaadkdtcfstegpnlvtrckdalaHHHHHH** |
| 432 | ACP214 | eahkseiahryndlgeqhfkglvliafsqylqkcsydehaklyqevtdfaktcvadesaancdkslhtlfgdklcaipnlren |
| | | ygeladcctkqepernecflqhkddnpslppferpeaeamctsfkenpttfmghylhevarrhpyfyapellyyaeqynei |
| | | ltqccaeadkescltpkldgykekalvssyrqGGGGSGGGGSGGSlveepknlvktncdlyeklgeygfqnailvr |
| | | ytqkapqvstptlveaarnlgrvgtkcctlpedqrlpcvedylsailnrvcllhektpysehvtkccsgslverrpcfsaltvdet |
| | | yypkefkaetftfhsdictlpekekqikkqtalaelvkhkpkataeqlktvmddfaqfldtcckaadkdtcfstegpnlvtrck |
| | | dalaSGGPGPAGMKGLPGShgtviesleslnnyfnssgidveekslfldiwrnwqkdgdmkilqsqiisfylrlfe |
| | | vlkdnqaisnnisvieshlittffsnskakkdafmsiakfevnnpqvqrqafnelirvvhqllpesslrkrkrsrcSGGPGP |
| | | AGMKGLPGSeahkseiahryndlgeqhfkglvliafsqylqkcsydehaklyqevtdfaktcvadesaancdkslht |
| | | lfgdklcaipnlrenygeladcctkqepernecflqhkddnpslppferpeaeamctsfkenpttfmghylhevarrhpyfy |
| | | apellyyaeqyneiltqccaeadkescltpkldgvkekalvssvrqGGGGSGGGGSGGSlveepknlvktncdly |
| | | eklgeygfqnailvrytqkapqvstptlveaarnlgrvgtkcctlpedqrlpcvedylsailnrvcllhektpvsehvtkccsgs |
| | | lverrpcfsaltvdetyypkefkaetftfhsdictlpekekqikkqtalaelvkhkpkataeqlktvmddfaqfldtcckaadk |
| | | dtcfstegpnlvtrckdalaSGGPGPAGMKGLPGShgtviesleslnnyfnssgidveekslfldiwrnwqkdgd |
| | | mkilqsqiisfylrlfeylkdnqaisnnisvieshlittffsnskakkdafnsiakfevnnpqvqrqafnelirvvhqllpesslr |
| | | krkrsrcSGGPGPAGMKGLPGSeahkseiahryndlgeqhfkglvliafsqylqkcsydehaklyqevtdfaktc |
| | | vadesaancdkslhtlfgdklcaipnlrenygeladcctkqepernecflqhkddnpslppferpeaeamctsfkenpttfm |
| | | ghylhevarrhpyfyapellyyaeqyneiltqccaeadkescltpkldgvkekalvssvrqGGGGSGGGGSGGS1 |
| | | veepknlvktncdlyeklgeygfqnailvrytqkapqvstptlveaarnlgrvgtkcctlpedqrlpcvedylsailnrvcllhe |
| | | ktpvsehvtkccsgslverrpcfsaltvdetyvpkefkaetftfhsdictlpekekqikkqtalaelvkhkpkataeqlktvmd |
| | | dfaqfldtcckaadkdtcfstegpnlvtrckdalaHHHHHH** |
| 433 | ACP215 | EVQLVESGGGLVQPGNSLRLSCAASGFTFSKFGMSWVRQAPGKGLEWVSSISGS |
| | | GRDTLYAESVKGRFTISRDNAKTTLYLQMNSLRPEDTAVYYCTIGGSLSVSSQGT |
| | | LVTVSSggggsgggSGGPGPAGMKGLPGSggggsgggshgtviesleslnnyfnssgidveekslfldiwr |
| | | nwqkdgdmkilqsqiisfylrlfevlkdnqaisnnisvieshlittffsnskakkdafmsiakfevnnpqvqrqafnelirvv |
| | | hqllpesslrkrkrsrcggggsgggSGGPGPAGMKGLPGSggggsgggsEVQLVESGGGLVQPGN |
| | | SLRLSCAASGFTFSKFGMSWVRQAPGKGLEWVSSISGSGRDTLYAESVKGRFTIS |
| | | RDNAKTTLYLQMNSLRPEDTAVYYCTIGGSLSVSSQGTLVTVSSggggsgggSGGP |
| | | GPAGMKGLPGSggggsgggshgtviesleslnnyfnssgidveekslfldiwrnwqkdgdmkilqsqiisfylrlfe |
| | | vlkdnqaisnnisvieshlittffsnskakkdafmsiakfevnnpqvqrqafnelirvvhqllpesslrkrkrsrcggggsggg |
| | | SGGPGPAGMKGLPGSggggsgggsEVQLVESGGGLVQPGNSLRLSCAASGFTFSKFG |
| | | MSWVRQAPGKGLEWVSSISGSGRDTLYAESVKGRFTISRDNAKTTLYLQMNSLR |
| | | PEDTAVYYCTIGGSLSVSSQGTLVTVSSHHHHHH** |
| 434 | ACP240 | EVQLVESGGGLVQPGNSLRLSCAASGFTFSKFGMSWVRQAPGKGLEWVS |
| | | SISGSGRDTLYAESVKGRFTISRDNAKTTLYLQMNSLRPEDTAVYYCTIG |
| | | GSLSVSSQGTLVTVSSggggsggggsggggsiwelkkdvyvveldwypdapgemvvltcdtpee |
| | | dgitwtldqssevlgsgktltiqvkefgdagqytchkggevlshsllllhkkedgiwstdilkdqkepknktflrce |
| | | aknysgrftcwwlttistdltfsvkssrgssdpqgvtcgaatlsaervrgdnkeyeysvecqedsacpaaeeslpie |
| | | vmvdavhklkyenytssffirdiikpdppknlqlkplknsrqvevsweypdtwstphsyfsltfcvqvqgkskr |
| | | ekkdrvftdktsatvicrknasisvraqdryyssswsewasvpcsggggsggggsggggsrvipvsgparclsq |
| | | srnllkttddmvktareklkhysctaedidheditrdqtstlktclplelhknesclatretssttrgsclppqktslmm |
| | | tlclgsiyedlkmyqtefqainaalqnhnhqqiildkgmlvaidelmqslnhngetlrqkppvgeadpyrvkm |
| | | klcillhafstrvvtinrvmgylssaggggsggggsggggsggggsggggsggggsggggsggggsggggsQ |
| | | SVLTQPPSVSGAPGQRVTISCSGSRSNIGSNTVKWYQQLPGTAPKLLIYYN |
| | | DQRPSGVPDRFSGSKSGTSASLAITGLQAEDEADYYCQSYDRYTHPALLF |
| | | GTGTKVTVLggggsggggsggggsQVQLVESGGGVVQPGRSLRLSCAASGFTFS |
| | | SYGMHWVRQAPGKGLEWVAFIRYDGSNKYYADSVKGRFTISRDNSKNT |
| | | LYLQMNSLRAEDTAVYYCKTHGSHDNWGQGTMVTVSSHRHHHH |
| 435 | ACP241 | EAHKSEIAHRYNDLGEQHFKGLVLIAFSQYLQKCSYDEHAKLVQEVTDF |
| | | AKTCVADESAANCDKSLHTLFGDKLCAIPNLRENYGELADCCTKQEPER |
| | | NECFLQHKDDNPSLPPFERPEAEAMCTSFKENPTTFMGHYLHEVARRHPY |
| | | FYAPELLYYAEQYNEILTQCCAEADKESCLTPKLDGVKEKALVSSVRQR |
| | | MKCSSMQKFGERAFKAWAVARLSQTFPNADFAEITKLATDLTKVNKECC |
| | | HGDLLECADDRAELAKYMCENQATISSKLQTCCDKPLLKKAHCLSEVEH |
| | | DT1VIPADLPAIAADFVEDQEVCKNYAEAKDVFLGTFLYEYSRRHPDYSVS |
| | | LLLRLAKKYEATLEKCCAEANPPACYGTVLAEFQPLVEEPKNLVKTNCD |
| | | LYEKLGEYGFQNAILVRYTQKAPQVSTPTLVEAARNLGRVGTKCCTLPE |
| | | DQRLPCVEDYLSAILNRVCLLHEKTPVSEHVTKCCSGSLVERRPCFSALT |
| | | VDETYVPKEFKAETFTFHSDICTLPEKEKQIKKQTALAELVKHKPKATAE |
| | | QLKTVMDDFAQFLDTCCKAADKDTCFSTEGPNLVTRCKDALASGGPGPA |
| | | GMKGLPGSiwelkkdvyvveldwypdapgemvvltcdtpeedgitwtldqssevlgsgktltiqvkefg |
| | | dagqytchkggevlshsllllhkkedgiwstdilkdqkepknktflrceaknysgrftcwwlttistdltfsvkssrg |
| | | ssdpqgvtcgaatlsaervrgdnkeyeysvecqedsacpaaeeslpievmvdavhklkyenytssffirdiikpd |
| | | ppknlqlkplknsrqvevsweypdtwstphsyfsltfcvqvqgkskrekkdrvftdktsatvicrknasisvraq |
| | | dryyssswsewasvpcsggggsggggsggggsrvipvsgparclsqsrnllkttddmvktareklkhysctae |
| | | didheditrdqtstlktclplelhknesclatretssttrgsclppqktslmmtlclgsiyedlkmyqtefqainaalqn |
| | | hnhqqiildkgmlvaidelmqslnhngetlrqkppvgeadpyrvkmklcillhafstrvvtinrvmgylssaS |
| | | GGPGPAGMKGLPGSggggsggggsggggsggggsggggsggggsQSVLTQPPSVSGAP |
| | | GQRVTISCSGSRSNIGSNTVKWYQQLPGTAPKLLIYYNDQRPSGVPDRFS |
| | | GSKSGTSASLAITGLQAEDEADYYCQSYDRYTHPALLFGTGTKVTVLgggg |
| | | sggggsggggsQVQLVESGGGVVQPGRSLRLSCAASGFTFSSYGMHWVRQAP |
| | | GKGLEWVAFIRYDGSNKYYADSVKGRFTISRDNSKNTLYLQMNSLRAED |
| | | TAVYYCKTHGSHDNWGQGTMVTVSSHHHHHH** |
| 436 | ACP242 | iwelkkdvyvveldwypdapgemvvltcdtpeedgitwtldqssevlgsgktltiqvkefgdagqytchkggevlshslll |
| | | lhkkedgiwstdilkdqkepknktflrceaknysgrftcwwlttistdltfsvkssrgssdpqgvtcgaatlsaervrgdnkey |
| | | eysvecqedsacpaaeeslpievmvdavhklkyenytssffirdiikpdppknlqlkplknsrqvevsweypdtwstphs |
| | | yfsltfcvqvqgkskrekkdrvftdktsatvicrknasisvraqdryyssswsewasvpcsggggsggggsggggsrvipv |
| | | sgparclsqsrnllkttddmvktareklkhysctaedidheditrdqtstlktclplelhknesclatretssttrgsclppqktslm |
| | | mtlclgsiyedlkmyqtefqainaalqnhnhqqiildkgmlvaidelmqslnhngetlrqkppvgeadpyrvkmklcillh |
| | | afstrvvtinrvmgylssaSGGPGPAGMKGLPGSggggsggggsggggsggggsggggsggggsQSVLT |
| | | QPPSVSGAPGQRVTISCSGSRSNIGSNTVKWYQQLPGTAPKLLIYYNDQRPSGVP |
| | | DRFSGSKSGTSASLAITGLQAEDEADYYCQSYDRYTHPALLFGTGTKVTVLggggs |
| | | ggggsggggsQVQLVESGGGVVQPGRSLRLSCAASGFTFSSYGMHWVRQAPGKGLE |
| | | WVAFIRYDGSNKYYADSVKGRFTISRDNSKNTLYLQMNSLRAEDTAVYYCKTH |
| | | GSHDNWGQGTMVTVSSSGGPGPAGMKGLPGSEAHKSEIAHRYNDLGEQHFKGL |
| | | VLIAFSQYLQKCSYDEHAKLVQEVTDFAKTCVADESAANCDKSLHTLFGDKLC |
| | | AIPNLRENYGELADCCTKQEPERNECFLQHKDDNPSLPPFERPEAEAMCTSFKEN |
| | | PTTFMGHYLHEVARRHPYFYAPELLYYAEQYNEILTQCCAEADKESCLTPKLDG |
| | | VKEKALVSSVRQRMKCSSMQKFGERAFKAWAVARLSQTFPNADFAEITKLATD |
| | | LTKVNKECCHGDLLECADDRAELAKYMCENQATISSKLQTCCDKPLLKKAHCL |
| | | SEVEHDTMPADLPAIAADFVEDQEVCKNYAEAKDVFLGTFLYEYSRRHPDYSVS |
| | | LLLRLAKKYEATLEKCCAEANPPACYGTVLAEFQPLVEEPKNLVKTNCDLYEKL |
| | | GEYGFQNAILVRYTQKAPQVSTPTLVEAARNLGRVGTKCCTLPEDQRLPCVEDY |
| | | LSAILNRVCLLHEKTPVSEHVTKCCSGSLVERRPCFSALTVDETYVPKEFKAETFT |
| | | FHSDICTLPEKEKQIKKQTALAELVKHKPKATAEQLKTVMDDFAQFLDTCCKAA |
| | | DKDTCFSTEGPNLVTRCKDALAHHHHHH** |
| 437 | ACP243 | vprdcgckpcictvpevssvfifppkpkdvltitltpkvtcvvvdiskddpevqfswfvddvevhtaqtqpreeqfnstfrsv |
| | | selpimhqdwlngkefkcrvnsaafpapiektisktkgrpkapqvytipppkeqmakdkvsltcmitdffpeditvewq |
| | | wngqpaenykntqpimdtdgsyfvysklnvqksnweagntftcsvlheglhnhhtekslshspgkSGGPGPAGM |
| | | KGLPGSiwelkkdvyvveldwypdapgemvvltcdtpeedgitwtldqssevlgsgktltitiqvkefgdagqytchkg |
| | | gevlshsllllhkkedgiwstdilkdqkepknktflrceaknysgrftcwwlttistdltfsvkssrgssdpqgvtcgaatlsaer |
| | | vrgdnkeyeysvecqedsacpaaeeslpievmvdavhklkyenytssffirdiikpdppknlqlkplknsrqvevsweyp |
| | | dtwstphsyfsltfcvqvqgkskrekkdrvftdktsatvicrknasisvraqdryyssswsewasvpcsggggsggggsgg |
| | | ggsrvipvsgparclsqsrnllkttddmvktareklkhysctaedidheditrdqtstlktclplelhknesclatretssttrgscl |
| | | ppqktslmmtlclgsiyedlkmyqtefqainaalqnhnhqqiildkgmlvaidelmqslnhngetlrqkppygeadpyrv |
| | | kmklcillhafstrvvtinrvmgylssaSGGPGPAGMKGLPGSggggsggggsggggsggggsggggsgggg |
| | | sQSVLTQPPSVSGAPGQRVTISCSGSRSNIGSNTVKWYQQLPGTAPKLLIYYNDQ |
| | | RPSGVPDRFSGSKSGTSASLAITGLQAEDEADYYCQSYDRYTHPALLFGTGTKVT |
| | | VLggggsggggsggggsQVQLVESGGGVVQPGRSLRLSCAASGFTFSSYGMHWVRQA |
| | | PGKGLEWVAFIRYDGSNKYYADSVKGRFTISRDNSKNTLYLQMNSLRAEDTAV |
| | | YYCKTHGSHDNWGQGTMVTVSSHHHHHH** |
| 438 | ACP244 | iwelkkdvyvveldwypdapgemvvltcdtpeedgitwtldqssevlgsgktlitiqvkefgdagqytchkggevlshslll |
| | | lhkkedgiwstdilkdqkepknktflrceaknysgrftcwwlttistdltfsvkssrgssdpqgvtcgaatlsaervrgdnkey |
| | | eysvecqedsacpaaeeslpievmvdavhklkyenytssffirdiikpdppknlqlkplknsrqvevsweypdtwstphs |
| | | yfsltcvqvqgkskrekkdrvftdktsatvicrknasisvraqdryyssswsewasvpcsggggsggggsggggsrvipv |
| | | sgparclsqsrnllkttddmvktareklkhysctaedidheditrdqtstlktclplelhknesclatretssttrgsclppqktslm |
| | | mtlclgsiyedlkmyqtefqainaalqnhnhqqiildkgmlvaidelmqslnhngetlrqkppygeadpyrvkmklcillh |
| | | afstrvvtinrvmgylssaSGGPGPAGMKGLPGSggggsggggsggggsggggsggggsggggsQSVLT |
| | | QPPSVSGAPGQRVTISCSGSRSNIGSNTVKWYQQLPGTAPKLLIYYNDQRPSGVP |
| | | DRFSGSKSGTSASLAITGLQAEDEADYYCQSYDRYTHPALLFGTGTKVTVLggggs |
| | | ggggsggggsQVQLVESGGGVVQPGRSLRLSCAASGFTFSSYGMHWVRQAPGKGLE |
| | | WVAFIRYDGSNKYYADSVKGRFTISRDNSKNTLYLQMNSLRAEDTAVYYCKTH |
| | | GSHDNWGQGTMVTVSSSGGPGPAGMKGLPGSvprdcgckpcictypevssvfifppkpkdvltit |
| | | ltpkvtcvvvdiskddpevqfswfvddvevhtaqtqpreeqfnstfrsvselpimhqdwlngkefkcrvnsaafpapiekt |
| | | isktkgrpkapqvytipppkeqmakdkvsltcmitdffpeditvewqwngqpaenykntqpimdtdgsyfyysklnvq |
| | | ksnweagnthcsylheglhnhhtekslshspgkHHHHHH** |
| 439 | ACP245 | EVQLVESGGGLVQPGNSLRLSCAASGFTFSKFGMSWVRQAPGKGLEWVS |
| | | SISGSGRDTLYAESVKGRFTISRDNAKTTLYLQMNSLRPEDTAVYYCTIG |
| | | GSLSVSSQGTLVTVSSSGGPGPAGMKGLPGSiwelkkdvyvveldwypdapgemvvl |
| | | tcdtpeedgitwtldqssevlgsgktltiqvkefgdagqytchkggevlshsllllhkkedgiwstdilkdqkepk |
| | | nktflrceaknysgrftcwwlttistdltfsvkssrgssdpqgvtcgaatlsaervrgdnkeyeysvecqedsacpa |
| | | aeeslpievmvdavhklkyenytssffirdiikpdppknlqlkplknsrqvevsweypdtwstphsyfsltfcvq |
| | | vqgkskrekkdrvftdktsatvicrknasisvraqdryyssswsewasvpcsggggsggggsggggsrvipvs |
| | | gparclsqsrnllkttddmvktareklkhysctaedidheditrdqtstlktclplelhknesclatretssttrgsclpp |
| | | qktslmmtlclgsiyedlkmyqtefqainaalqnhnhqqiildkgmlvaidelmqslnhngetlrqkppvgea |
| | | dpyrvkmklcillhafstrvvtinrvmgylssaSGGPGPAGMKGLPGSggggsggggsggggsggg |
| | | gsggggsggggsQSVLTQPPSVSGAPGQRVTISCSGSRSNIGSNTVKWYQQLPG |
| | | TAPKLLIYYNDQRPSGVPDRFSGSKSGTSASLAITGLQAEDEADYYCQSY |
| | | DRYTHPALLFGTGTKVTVLSGGPGPAGMKGLPGSQVQLVESGGGVVQP |
| | | GRSLRLSCAASGFTFSSYGMHWVRQAPGKGLEWVAFIRYDGSNKYYAD |
| | | SVKGRFTISRDNSKNTLYLQMNSLRAEDTAVYYCKTHGSHDNWGQGTM |
| | | VTVSSHHHHHH |
| 440 | ACP247 | EVQLVESGGGLVQPGNSLRLSCAASGFTFSKFGMSWVRQAPGKGLEWVS |
| | | SISGSGRDTLYAESVKGRFTISRDNAKTTLYLQMNSLRPEDTAVYYCTIG |
| | | GSLSVSSQGTLVTVSSSGGPGPAGMKGLPGSiwelkkdvyvveldwypdapgemvvl |
| | | tcdtpeedgitwtldqssevlgsgktltiqvkefgdagqytchkggevlshsllllhkkedgiwstdilkdqkepk |
| | | nktflrceaknysgrftcwwlttistdltfsvkssrgssdpqgvtcgaatlsaervrgdnkeyeysvecqedsacpa |
| | | aeeslpievmvdavhklkyenytssffirdiikpdppknlqlkplknsrqvevsweypdtwstphsyfsltfcvq |
| | | vqgkskrekkdrvftdktsatvicrknasisvraqdryyssswsewasvpcsggggsggggsggggsrvipvs |
| | | gparclsqsrnllkttddmvktareklkhysctaedidheditrdqtstlktclplelhknesclatretssttrgsclpp |
| | | qktslmmtlclgsiyedlkmyqtefqainaalqnhnhqqiildkgmlvaidelmqslnhngetlrqkppvgea |
| | | dpyrvkmklcillhafstrvvtinrvmgylssaSGGPGPAGMKGLPGSggggsggggsggggsggg |
| | | gsggggsggggsQVQLQESGGGLVQAGGSLRLSCAASGRTFSSVYDMGWFRQ |
| | | APGKDREFVARITESARNTRYADSVRGRFTISRDNAKNTVYLQMNNLEL |
| | | EDAAVYYCAADPQTVVVGTPDYWGQGTQVTVSSHHHHHH |

### INCORPORATION BY REFERENCE

[0334] The entire disclosures of all patent and non-patent publications cited herein are each incorporated by reference in their entireties for all purposes.

### Other Embodiments

[0335] The disclosure set forth above may encompass multiple distinct inventions with independent utility. Although each of these inventions has been disclosed in its preferred form(s), the specific embodiments thereof as disclosed and illustrated herein are not to be considered in a limiting sense, because numerous variations are possible. The subject matter of the inventions includes all novel and nonobvious combinations and subcombinations of the various elements, features, functions, and/or properties disclosed herein. The following claims particularly point out certain combinations and subcombinations regarded as novel and nonobvious. Inventions embodied in other combinations and subcombinations of features, functions, elements, and/or properties may be claimed in this application, in applications claiming priority from this application, or in related applications. Such claims, whether directed to a different invention or to the same invention, and whether broader, narrower, equal, or different in scope in comparison to the original claims, also are regarded as included within the subject matter of the inventions of the present disclosure.

The application's sequence listing, which the Patent Office published only in electronic form, follows.

SEQUENCE LISTING (453 sequences)

SEQ ID NO: 1 - protein, 153 aa, Homo sapiens
MYRMQLLSCIALSLALVTNSAPTSSSTKKTQLQLEHLLLDLQMILNGINNYKNPKLTRMLTFKFYMPKKATELKHLQCLEEELKPLEEVLNLAQSKNFHLRPRDLISNINVIVLELKGSETTFMCEYADETATIVEFLNRWITFCQSIISTLT

SEQ ID NO: 2 - protein, 609 aa, Homo sapiens [sequence omitted]

SEQ ID NO: 3 - protein, 8 aa, Unknown
  Description of Unknown: MMP7 cleavage domain sequence
KRALGLPG

SEQ ID NO: 4 - protein, 40 aa, Unknown
  Description of Unknown: MMP7 cleavage domain sequence
DEDEDEDEDEDEDEDERPLALWRSDRDRDRDRDRDRDRDR

SEQ ID NO: 5 - protein, 5 aa, Unknown
  Description of Unknown: MMP9 cleavage domain sequence
  MOD_RES (3)..(3): Ser or Thr
  MOD_RES (4)..(4): Leu or Ile
  MOD_RES (5)..(5): Ser or Thr
PRXXX

SEQ ID NO: 6 - protein, 5 aa, Unknown
  Description of Unknown: MMP9 cleavage domain sequence
LEATA

SEQ ID NO: 7 - protein, 10 aa, Unknown
  Description of Unknown: MMP11 cleavage domain sequence
GGAANLVRGG

SEQ ID NO: 8 - protein, 10 aa, Unknown
  Description of Unknown: MMP14 cleavage domain sequence
SGRIGFLRTA

SEQ ID NO: 9 - protein, 6 aa, Unknown
  Description of Unknown: MMP cleavage domain sequence
PLGLAG

SEQ ID NO: 10 - protein, 6 aa, Unknown
  Description of Unknown: MMP cleavage domain sequence
  MOD_RES (6)..(6): Any amino acid
PLGLAX

SEQ ID NO: 11 - protein, 6 aa, Unknown
  Description of Unknown: MMP cleavage domain sequence
  MOD_RES (4)..(4): Cys(me)
PLGXAG

SEQ ID NO: 12 - protein, 8 aa, Unknown
  Description of Unknown: MMP cleavage domain sequence
ESPAYYTA

SEQ ID NO: 13 - protein, 6 aa, Unknown
  Description of Unknown: MMP cleavage domain sequence
RLQLKL

SEQ ID NO: 14 - protein, 7 aa, Unknown
  Description of Unknown: MMP cleavage domain sequence
RLQLKAC

SEQ ID NO: 15 - protein, 7 aa, Unknown
  Description of Unknown: MMP2, MMP9, MMP14 cleavage domain sequence
  MOD_RES (3)..(3): Cit
  MOD_RES (5)..(5): Hof
EPXGXYL

SEQ ID NO: 16 - protein, 5 aa, Unknown
  Description of Unknown: Urokinase plasminogen activator (uPA) cleavage domain sequence
SGRSA

SEQ ID NO: 17 - protein, 4 aa, Unknown
  Description of Unknown: Urokinase plasminogen activator (uPA) cleavage domain sequence
DAFK

SEQ ID NO: 18 - protein, 5 aa, Unknown
  Description of Unknown: Urokinase plasminogen activator (uPA) cleavage domain sequence
GGGRR

SEQ ID NO: 19 - protein, 4 aa, Unknown
  Description of Unknown: Lysosomal Enzyme cleavage domain sequence
GFLG

SEQ ID NO: 20 - protein, 4 aa, Unknown
  Description of Unknown: Lysosomal Enzyme cleavage domain sequence
ALAL

SEQ ID NO: 21 - protein, 2 aa, Unknown
  Description of Unknown: Lysosomal Enzyme cleavage domain sequence
FK

SEQ ID NO: 22 - protein, 3 aa, Unknown
  Description of Unknown: Cathepsin B cleavage domain sequence
NLL

SEQ ID NO: 23 - protein, 5 aa, Unknown
  Description of Unknown: Cathepsin D cleavage domain sequence
  MOD_RES (3)..(3): Cys(Et)
PIXFF

SEQ ID NO: 24 - protein, 8 aa, Unknown
  Description of Unknown: Cathepsin K cleavage domain sequence
GGPRGLPG

SEQ ID NO: 25 - protein, 6 aa, Unknown
  Description of Unknown: Prostate Specific Antigen cleavage domain sequence
HSSKLQ

SEQ ID NO: 26 - protein, 7 aa, Unknown
  Description of Unknown: Prostate Specific Antigen cleavage domain sequence
HSSKLQL

SEQ ID NO: 27 - protein, 9 aa, Unknown
  Description of Unknown: Prostate Specific Antigen cleavage domain sequence
HSSKLQEDA

SEQ ID NO: 28 - protein, 10 aa, Unknown
  Description of Unknown: Herpes Simplex Virus Protease cleavage domain sequence
LVLASSSFGY

SEQ ID NO: 29 - protein, 10 aa, Unknown
  Description of Unknown: HIV Protease cleavage domain sequence
GVSQNYPIVG

SEQ ID NO: 30 - protein, 10 aa, Unknown
  Description of Unknown: CMV Protease cleavage domain sequence
GVVQASCRLA

SEQ ID NO: 31 - protein, 4 aa, Unknown
  Description of Unknown: Thrombin cleavage domain sequence
  MOD_RES (2)..(2): 2-carboxy piperdine
FXRS

SEQ ID NO: 32 - protein, 6 aa, Unknown
  Description of Unknown: Thrombin cleavage domain sequence
DPRSFL

SEQ ID NO: 33 - protein, 6 aa, Unknown
  Description of Unknown: Thrombin cleavage domain sequence
PPRSFL

SEQ ID NO: 34 - protein, 4 aa, Unknown
  Description of Unknown: Caspase-3 cleavage domain sequence
DEVD

SEQ ID NO: 35 - protein, 5 aa, Unknown
  Description of Unknown: Caspase-3 cleavage domain sequence
DEVDP

SEQ ID NO: 36 - protein, 8 aa, Unknown
  Description of Unknown: Caspase-3 cleavage domain sequence
KGSGDVEG

SEQ ID NO: 37 - protein, 6 aa, Unknown
  Description of Unknown: Interleukin 1-beta converting enzyme cleavage domain sequence
GWEHDG

SEQ ID NO: 38 - protein, 7 aa, Unknown
  Description of Unknown: Enterokinase cleavage domain sequence
EDDDDKA

SEQ ID NO: 39 - protein, 9 aa, Unknown
  Description of Unknown: FAP cleavage domain sequence
KQEQNPGST

SEQ ID NO: 40 - protein, 6 aa, Unknown
  Description of Unknown: Kallikrein 2 cleavage domain sequence
GKAFRR

SEQ ID NO: 41 - protein, 4 aa, Unknown
  Description of Unknown: Plasmin cleavage domain sequence
DAFK

SEQ ID NO: 42 - protein, 4 aa, Unknown
  Description of Unknown: Plasmin cleavage domain sequence
DVLK

SEQ ID NO: 43 - protein, 4 aa, Unknown
  Description of Unknown: Plasmin cleavage domain sequence
DAFK

SEQ ID NO: 44 - protein, 7 aa, Unknown
  Description of Unknown: TOP cleavage domain sequence
ALLLALL

SEQ ID NO: 45 - protein, 652 aa, Artificial Sequence
  Description of Artificial Sequence: Synthetic polypeptide
QVQLQESGGGLVQAGGSLRLSCAASGRIFSIDIMSWYRQAPGKQRELVARITRGGTISYDDSVKGRFTISRDNAKNTVYLQMNSLKPEDTGVYYCNALYGTDYWGKGTQVTVSSGGGGSGGGGSGGGGSAPTSSSTKKTQLQLEHLLLDLQMILNGINNYKNPKLTRMLTFKFYMPKKATELKHLQCLEEELKPLEEVLNLAQSKNFHLRPRDLISNINVIVLELKGSETTFMCEYADETATIVEFLNRWITFCQSIISTLTSGGPGPAGMKGLPGSEVQLVESGGGLVQPGNSLRLSCAASGFTFSKFGMSWVRQAPGKGLEWVSSISGSGRDTLYAESVKGRFTISRDNAKTTLYLQMNSLRPEDTAVYYCTIGGSLSVSSQGTLVTVSSGGGGSGGGGSGGGGSEVQLVESGGGLVQPGGSLRLSCAASGFTFSSYTLAWVRQAPGKGLEWVAAIDSSSYTYSPDTVRGRFTISRDNAKNSLYLQMNSLRAEDTAVYYCARDSNWDALDYWGQGTTVTVSSGGGGSGGGGSGGGGSDIQMTQSPSSLSASVGDRVTITCKASQNVGTNVGWYQQKPGKAPKALIYSASFRYSGVPSRFSGSGSGTDFTLTISSLQPEDFATYYCQQYYTYPYTFGGGTKVEIKHHHHHH

SEQ ID NO: 46 - protein, 652 aa, Artificial Sequence
  Description of Artificial Sequence: Synthetic polypeptide
QVQLQESGGGLVQAGGSLRLSCAASGRIFSIDIMSWYRQAPGKQRELVARITRGGTISYDDSVKGRFTISRDNAKNTVYLQMNSLKPEDTGVYYCNALYGTDYWGKGTQVTVSSGGGGSGGGGSGGGGSEVQLVESGGGLVQPGGSLRLSCAASGFTFSSYTLAWVRQAPGKGLEWVAAIDSSSYTYSPDTVRGRFTISRDNAKNSLYLQMNSLRAEDTAVYYCARDSNWDALDYWGQGTTVTVSSGGGGSGGGGSGGGGSDIQMTQSPSSLSASVGDRVTITCKASQNVGTNVGWYQQKPGKAPKALIYSASFRYSGVPSRFSGSGSGTDFTLTISSLQPEDFATYYCQQYYTYPYTFGGGTKVEIKGGGGSGGGGSGGGGSEVQLVESGGGLVQPGNSLRLSCAASGFTFSKFGMSWVRQAPGKGLEWVSSISGSGRDTLYAESVKGRFTISRDNAKTTLYLQMNSLRPEDTAVYYCTIGGSLSVSSQGTLVTVSSSGGPGPAGMKGLPGSAPTSSSTKKTQLQLEHLLLDLQMILNGINNYKNPKLTRMLTFKFYMPKKATELKHLQCLEEELKPLEEVLNLAQSKNFHLRPRDLISNINVIVLELKGSETTFMCEYADETATIVEFLNRWITFCQSIISTLTHHHHHH

SEQ ID NO: 47 - protein, 553 aa, Artificial Sequence
  Description of Artificial Sequence: Synthetic polypeptide
EVQLVESGGGLVQPGGSLRLSCAASGFTFSSYTLAWVRQAPGKGLEWVAAIDSSSYTYSPDTVRGRFTISRDNAKNSLYLQMNSLRAEDTAVYYCARDSNWDALDYWGQGTTVTVSSGGGGSGGGGSGGGGSDIQMTQSPSSLSASVGDRVTITCKASQNVGTNVGWYQQKPGKAPKALIYSASFRYSGVPSRFSGSGSGTDFTLTISSLQPEDFATYYCQQYYTYPYTFGGGTKVEIKGGGGSGGGGSGGGGSGGGGSGGGGSGGGGSSGGPGPAGMKGLPGSAPTSSSTKKTQLQLEHLLLDLQMILNGINNYKNPKLTRMLTFKFYMPKKATELKHLQCLEEELKPLEEVLNLAQSKNFHLRPRDLISNINVIVLELKGSETTFMCEYADETATIVEFLNRWITFCQSIISTLTSGGPGPAGMKGLPGSEVQLVESGGGLVQPGNSLRLSCAASGFTFSKFGMSWVRQAPGKGLEWVSSISGSGRDTLYAESVKGRFTISRDNAKTTLYLQMNSLRPEDTAVYYCTIGGSLSVSSQGTLVTVSSHHHHHH

SEQ ID NO: 48 - protein, 553 aa, Artificial Sequence
  Description of Artificial Sequence: Synthetic polypeptide
EVQLVESGGGLVQPGGSLRLSCAASGFTFSSYTLAWVRQAPGKGLEWVAAIDSSSYTYSPDTVRGRFTISRDNAKNSLYLQMNSLRAEDTAVYYCARDSNWDALDYWGQGTTVTVSSGGGGSGGGGSGGGGSDIQMTQSPSSLSASVGDRVTITCKASQNVGTNVGWYQQKPGKAPKALIYSASFRYSGVPSRFSGSGSGTDFTLTISSLQPEDFATYYCQQYYTYPYTFGGGTKVEIKGGGGSGGGGSGGGGSGGGGSGGGGSGGGGSEVQLVESGGGLVQPGNSLRLSCAASGFTFSKFGMSWVRQAPGKGLEWVSSISGSGRDTLYAESVKGRFTISRDNAKTTLYLQMNSLRPEDTAVYYCTIGGSLSVSSQGTLVTVSSGGGGSGGGGSGGGGSSGGPGPAGMKGLPGSAPTSSSTKKTQLQLEHLLLDLQMILNGINNYKNPKLTRMLTFKFYMPKKATELKHLQCLEEELKPLEEVLNLAQSKNFHLRPRDLISNINVIVLELKGSETTFMCEYADETATIVEFLNRWITFCQSIISTLTHHHHHH

SEQ ID NO: 49 - protein, 553 aa, Artificial Sequence
  Description of Artificial Sequence: Synthetic polypeptide
APTSSSTKKTQLQLEHLLLDLQMILNGINNYKNPKLTRMLTFKFYMPKKATELKHLQCLEEELKPLEEVLNLAQSKNFHLRPRDLISNINVIVLELKGSETTFMCEYADETATIVEFLNRWITFCQSIISTLTSGGPGPAGMKGLPGSEVQLVESGGGLVQPGNSLRLSCAASGFTFSKFGMSWVRQAPGKGLEWVSSISGSGRDTLYAESVKGRFTISRDNAKTTLYLQMNSLRPEDTAVYYCTIGGSLSVSSQGTLVTVSSGGGGSGGGGSGGGGSGGGGSGGGGSGGGGSSGGPGPAGMKGLPGSEVQLVESGGGLVQPGGSLRLSCAASGFTFSSYTLAWVRQAPGKGLEWVAAIDSSSYTYSPDTVRGRFTISRDNAKNSLYLQMNSLRAEDTAVYYCARDSNWDALDYWGQGTTVTVSSGGGGSGGGGSGGGGSDIQMTQSPSSLSASVGDRVTITCKASQNVGTNVGWYQQKPGKAPKALIYSASFRYSGVPSRFSGSGSGTDFTLTISSLQPEDFATYYCQQYYTYPYTFGGGTKVEIKHHHHHH

SEQ ID NO: 50 - protein, 682 aa, Artificial Sequence
  Description of Artificial Sequence: Synthetic polypeptide
QVQLQESGGGLVQAGGSLRLSCAASGRIFSIDIMSWYRQAPGKQRELVARITRGGTISYDDSVKGRFTISRDNAKNTVYLQMNSLKPEDTGVYYCNALYGTDYWGKGTQVTVSSGGGGSGGGGSGGGGSAPTSSSTKKTQLQLEHLLLDLQMILNGINNYKNPKLTRMLTFKFYMPKKATELKHLQCLEEELKPLEEVLNLAQSKNFHLRPRDLISNINVIVLELKGSETTFMCEYADETATIVEFLNRWITFCQSIISTLTSGGPGPAGMKGLPGSEVQLVESGGGLVQPGNSLRLSCAASGFTFSKFGMSWVRQAPGKGLEWVSSISGSGRDTLYAESVKGRFTISRDNAKTTLYLQMNSLRPEDTAVYYCTIGGSLSVSSQGTLVTVSSGGGGSGGGGSGGGGSGGGGSGGGGSGGGGSSGGPGPAGMKGLPGSEVQLVESGGGLVQPGGSLRLSCAASGFTFSSYTLAWVRQAPGKGLEWVAAIDSSSYTYSPDTVRGRFTISRDNAKNSLYLQMNSLRAEDTAVYYCARDSNWDALDYWGQGTTVTVSSGGGGSGGGGSGGGGSDIQMTQSPSSLSASVGDRVTITCKASQNVGTNVGWYQQKPGKAPKALIYSASFRYSGVPSRFSGSGSGTDFTLTISSLQPEDFATYYCQQYYTYPYTFGGGTKVEIKHHHHHH

SEQ ID NO: 51 - protein, 667 aa, Artificial Sequence
  Description of Artificial Sequence: Synthetic polypeptide
QVQLQESGGGLVQAGGSLRLSCAASGRIFSIDIMSWYRQAPGKQRELVARITRGGTISYDDSVKGRFTISRDNAKNTVYLQMNSLKPEDTGVYYCNALYGTDYWGKGTQVTVSSGGGGSGGGGSGGGGSAPTSSSTKKTQLQLEHLLLDLQMILNGINNYKNPKLTRMLTFKFYMPKKATELKHLQCLEEELKPLEEVLNLAQSKNFHLRPRDLISNINVIVLELKGSETTFMCEYADETATIVEFLNRWITFCQSIISTLTSGGPGPAGMKGLPGSEVQLVESGGGLVQPGNSLRLSCAASGFTFSKFGMSWVRQAPGKGLEWVSSISGSGRDTLYAESVKGRFTISRDNAKTTLYLQMNSLRPEDTAVYYCTIGGSLSVSSQGTLVTVSSGGGGSGGGGSGGGGSGGGGSGGGGSGGGGSEVQLVESGGGLVQPGGSLRLSCAASGFTFSSYTLAWVRQAPGKGLEWVAAIDSSSYTYSPDTVRGRFTISRDNAKNSLYLQMNSLRAEDTAVYYCARDSNWDALDYWGQGTTVTVSSSGGPGPAGMKGLPGSDIQMTQSPSSLSASVGDRVTITCKASQNVGTNVGWYQQKPGKAPKALIYSASFRYSGVPSRFSGSGSGTDFTLTISSLQPEDFATYYCQQYYTYPYTFGGGTKVEIKHHHHHH

SEQ ID NO: 52 - protein, 682 aa, Artificial Sequence
  Description of Artificial Sequence: Synthetic polypeptide
APTSSSTKKTQLQLEHLLLDLQMILNGINNYKNPKLTRMLTFKFYMPKKATELKHLQCLEEELKPLEEVLNLAQSKNFHLRPRDLISNINVIVLELKGSETTFMCEYADETATIVEFLNRWITFCQSIISTLTSGGPGPAGMKGLPGSGGGGSGGGGSGGGGSGGGGSGGGGSGGGGSEVQLVESGGGLVQPGGSLRLSCAASGFTFSSYTLAWVRQAPGKGLEWVAAIDSSSYTYSPDTVRGRFTISRDNAKNSLYLQMNSLRAEDTAVYYCARDSNWDALDYWGQGTTVTVSSGGGGSGGGGSGGGGSDIQMTQSPSSLSASVGDRVTITCKASQNVGTNVGWYQQKPGKAPKALIYSASFRYSGVPSRFSGSGSGTDFTLTISSLQPEDFATYYCQQYYTYPYTFGGGTKVEIKGGGGSGGGGSGGGGSEVQLVESGGGLVQPGNSLRLSCAASGFTFSKFGMSWVRQAPGKGLEWVSSISGSGRDTLYAESVKGRFTISRDNAKTTLYLQMNSLRPEDTAVYYCTIGGSLSVSSQGTLVTVSSGGGGSGGGGSGGGGSQVQLQESGGGLVQAGGSLRLSCAASGRIFSIDIMSWYRQAPGKQRELVARITRGGTISYDDSVKGRFTISRDNAKNTVYLQMNSLKPEDTGVYYCNALYGTDYWGKGTQVTVSSHHHHHH

SEQ ID NO: 53 - protein, 393 aa, Artificial Sequence
  Description of Artificial Sequence: Synthetic polypeptide
APTSSSTKKTQLQLEHLLLDLQMILNGINNYKNPKLTRMLTFKFYMPKKATELKHLQCLEEELKPLEEVLNLAQSKNFHLRPRDLISNINVIVLELKGSETTFMCEYADETATIVEFLNRWITFCQSIISTLTSGGPGPAGMKGLPGSEVQLVESGGGLVQPGGSLRLSCAASGFTFSSYTLAWVRQAPGKGLEWVAAIDSSSYTYSPDTVRGRFTISRDNAKNSLYLQMNSLRAEDTAVYYCARDSNWDALDYWGQGTTVTVSSGGGGSGGGGSGGGGSDIQMTQSPSSLSASVGDRVTITCKASQNVGTNVGWYQQKPGKAPKALIYSASFRYSGVPSRFSGSGSGTDFTLTISSLQPEDFATYYCQQYYTYPYTFGGGTKVEIKHHHHHH

SEQ ID NO: 54 - protein, 423 aa, Artificial Sequence
  Description of Artificial Sequence: Synthetic polypeptide
APTSSSTKKTQLQLEHLLLDLQMILNGINNYKNPKLTRMLTFKFYMPKKATELKHLQCLEEELKPLEEVLNLAQSKNFHLRPRDLISNINVIVLELKGSETTFMCEYADETATIVEFLNRWITFCQSIISTLTSGGPGPAGMKGLPGSGGGGSGGGGSGGGGSGGGGSGGGGSGGGGSEVQLVESGGGLVQPGGSLRLSCAASGFTFSSYTLAWVRQAPGKGLEWVAAIDSSSYTYSPDTVRGRFTISRDNAKNSLYLQMNSLRAEDTAVYYCARDSNWDALDYWGQGTTVTVSSGGGGSGGGGSGGGGSDIQMTQSPSSLSASVGDRVTITCKASQNVGTNVGWYQQKPGKAPKALIYSASFRYSGVPSRFSGSGSGTDFTLTISSLQPEDFATYYCQQYYTYPYTFGGGTKVEIKHHHHHH

SEQ ID NO: 55 - protein, 682 aa, Artificial Sequence
  Description of Artificial Sequence: Synthetic polypeptide
APTSSSTKKTQLQLEHLLLDLQMILNGINNYKNPKLTRMLTFKFYMPKKATELKHLQCLEEELKPLEEVLNLAQSKNFHLRPRDLISNINVIVLELKGSETTFMCEYADETATIVEFLNRWITFCQSIISTLTSGGPGPAGMKGLPGSGGGGSGGGGSGGGGSGGGGSGGGGSGGGGSEVQLVESGGGLVQPGGSLRLSCAASGFTFSSYTLAWVRQAPGKGLEWVAAIDSSSYTYSPDTVRGRFTISRDNAKNSLYLQMNSLRAEDTAVYYCARDSNWDALDYWGQGTTVTVSSGGGGSGGGGSGGGGSDIQMTQSPSSLSASVGDRVTITCKASQNVGTNVGWYQQKPGKAPKALIYSASFRYSGVPSRFSGSGSGTDFTLTISSLQPEDFATYYCQQYYTYPYTFGGGTKVEIKSGGPGPAGMKGLPGSEVQLVESGGGLVQPGNSLRLSCAASGFTFSKFGMSWVRQAPGKGLEWVSSISGSGRDTLYAESVKGRFTISRDNAKTTLYLQMNSLRPEDTAVYYCTIGGSLSVSSQGTLVTVSSGGGGSGGGGSGGGGSQVQLQESGGGLVQAGGSLRLSCAASGRIFSIDIMSWYRQAPGKQRELVARITRGGTISYDDSVKGRFTISRDNAKNTVYLQMNSLKPEDTGVYYCNALYGTDYWGKGTQVTVSSHHHHHH

SEQ ID NO: 56 - protein, 682 aa, Artificial Sequence
  Description of Artificial Sequence: Synthetic polypeptide
QVQLQESGGGLAQAGGSLSLSCAASGFTVSNSVMAWYRQTPGKQREFVAIINSVGSTNYADSVKGRFTISRDNAKNTVYLQMNNLKPEDTAVYVCNRNFDRIYWGQGTQVTVSSSGGPGPAGMKGLPGSEVQLVESGGGLVQPGGSLRLSCAASGFTFSSYTLAWVRQAPGKGLEWVAAIDSSSYTYSPDTVRGRFTISRDNAKNSLYLQMNSLRAEDTAVYYCARDSNWDALDYWGQGTTVTVSSGGGGSGGGGSGGGGSDIQMTQSPSSLSASVGDRVTITCKASQNVGTNVGWYQQKPGKAPKALIYSASFRYSGVPSRFSGSGSGTDFTLTISSLQPEDFATYYCQQYYTYPYTFGGGTKVEIKGGGGSGGGGSGGGGSGGGGSGGGGSGGGGSSGGPGPAGMKGLPGSEVQLVESGGGLVQPGNSLRLSCAASGFTFSKFGMSWVRQAPGKGLEWVSSISGSGRDTLYAESVKGRFTISRDNAKTTLYLQMNSLRPEDTAVYYCTIGGSLSVSSQGTLVTVSSSGGPGPAGMKGLPGSAPTSSSTKKTQLQLEHLLLDLQMILNGINNYKNPKLTRMLTFKFYMPKKATELKHLQCLEEELKPLEEVLNLAQSKNFHLRPRDLISNINVIVLELKGSETTFMCEYADETATIVEFLNRWITFCQSIISTLTHHHHHH

SEQ ID NO: 57 - protein, 393 aa, Artificial Sequence
  Description of Artificial Sequence: Synthetic polypeptide
EVQLVESGGGLVQPGGSLRLSCAASGFTFSSYTLAWVRQAPGKGLEWVAAIDSSSYTYSPDTVRGRFTISRDNAKNSLYLQMNSLRAEDTAVYYCARDSNWDALDYWGQGTTVTVSSGGGGSGGGGSGGGGSDIQMTQSPSSLSASVGDRVTITCKASQNVGTNVGWYQQKPGKAPKALIYSASFRYSGVPSRFSGSGSGTDFTLTISSLQPEDFATYYCQQYYTYPYTFGGGTKVEIKSGGPGPAGMKGLPGSAPTSSSTKKTQLQLEHLLLDLQMILNGINNYKNPKLTRMLTFKFYMPKKATELKHLQCLEEELKPLEEVLNLAQSKNFHLRPRDLISNINVIVLELKGSETTFMCEYADETATIVEFLNRWITFCQSIISTLTHHHHHH

SEQ ID NO: 58 - protein, 423 aa, Artificial Sequence
  Description of Artificial Sequence: Synthetic polypeptide
EVQLVESGGGLVQPGGSLRLSCAASGFTFSSYTLAWVRQAPGKGLEWVAAIDSSSYTYSPDTVRGRFTISRDNAKNSLYLQMNSLRAEDTAVYYCARDSNWDALDYWGQGTTVTVSSGGGGSGGGGSGGGGSDIQMTQSPSSLSASVGDRVTITCKASQNVGTNVGWYQQKPGKAPKALIYSASFRYSGVPSRFSGSGSGTDFTLTISSLQPEDFATYYCQQYYTYPYTFGGGTKVEIKGGGGSGGGGSGGGGSGGGGSGGGGSGGGGSSGGPGPAGMKGLPGSAPTSSSTKKTQLQLEHLLLDLQMILNGINNYKNPKLTRMLTFKFYMPKKATELKHLQCLEEELKPLEEVLNLAQSKNFHLRPRDLISNINVIVLELKGSETTFMCEYADETATIVEFLNRWITFCQSIISTLTHHHHHH

SEQ ID NO: 59 - protein, 669 aa, Artificial Sequence
  Description of Artificial Sequence: Synthetic polypeptide
QVQLQESGGGLVQAGGSLRLSCAASGRIFSIDIMSWYRQAPGKQRELVARITRGGTISYDDSVKGRFTISRDNAKNTVYLQMNSLKPEDTGVYYCNALYGTDYWGKGTQVTVSSGGGGSGGGGSGGGGSAPTSSSTKKTQLQLEHLLLDLQMILNGINNYKNPKLTRMLTFKFYMPKKATELKHLQCLEEELKPLEEVLNLAQSKNFHLRPRDLISNINVIVLELKGSETTFMCEYADETATIVEFLNRWITFCQSIISTLTSGGPGPAGMKGLPGSEVQLVESGGGLVQPGNSLRLSCAASGFTFSKFGMSWVRQAPGKGLEWVSSISGSGRDTLYAESVKGRFTISRDNAKTTLYLQMNSLRPEDTAVYYCTIGGSLSVSSQGTLVTVSSGGGGSGGGGSGGGGSGGGGSQVQLQQSGAELVRPGTSVKVSCKASGYAFTNYLIEWVKQRPGQGLEWIGVINPGSGGTNYNEKFKGKATLTADKSSSTAYMQLSSLTSDDSAVYFCARWRGDGYYAYFDVWGAGTTVTVSSGGGGSGGGGSGGGGSDIVLTQSPASLAVSLGQRATISCKASQSVDYDGDSYMNWYQQKPGQPPKLLIYAASNLESGIPARFSGSGSGTDFTLNIHPVEEEDAATYYCQQSNEDPYTFGGGTKLEIKHHHHHHEPEA

SEQ ID NO: 60 - protein, 669 aa, Artificial Sequence
  Description of Artificial Sequence: Synthetic polypeptide
QVQLQESGGGLVQAGGSLRLSCAASGRIFSIDIMSWYRQAPGKQRELVARITRGGTISYDDSVKGRFTISRDNAKNTVYLQMNSLKPEDTGVYYCNALYGTDYWGKGTQVTVSSGGGGSGGGGSGGGGSAPTSSSTKKTQLQLEHLLLDLQMILNGINNYKNPKLTRMLTFKFYMPKKATELKHLQCLEEELKPLEEVLNLAQSKNFHLRPRDLISNINVIVLELKGSETTFMCEYADETATIVEFLNRWITFCQSIISTLTSGGPGPAGMKGLPGSEVQLVESGGGLVQPGNSLRLSCAASGFTFSKFGMSWVRQAPGKGLEWVSSISGSGRDTLYAESVKGRFTISRDNAKTTLYLQMNSLRPEDTAVYYCTIGGSLSVSSQGTLVTVSSGGGGSGGGGSGGGGSGGGGSDIVLTQSPASLAVSLGQRATISCKASQSVDYDGDSYMNWYQQKPGQPPKLLIYAASNLESGIPARFSGSGSGTDFTLNIHPVEEEDAATYYCQQSNEDPYTFGGGTKLEIKGGGGSGGGGSGGGGSQVQLQQSGAELVRPGTSVKVSCKASGYAFTNYLIEWVKQRPGQGLEWIGVINPGSGGTNYNEKFKGKATLTADKSSSTAYMQLSSLTSDDSAVYFCARWRGDGYYAYFDVWGAGTTVTVSSHHHHHHEPEA

SEQ ID NO: 61 - protein, 689 aa, Artificial Sequence
  Description of Artificial Sequence: Synthetic polypeptide
APTSSSTKKTQLQLEHLLLDLQMILNGINNYKNPKLTRMLTFKFYMPKKATELKHLQCLEEELKPLEEVLNLAQSKNFHLRPRDLISNINVIVLELKGSETTFMCEYADETATIVEFLNRWITFCQSIISTLTSGGPGPAGMKGLPGSGGGGSGGGGSGGGGSGGGGSGGGGSQVQLQQSGAELVRPGTSVKVSCKASGYAFTNYLIEWVKQRPGQGLEWIGVINPGSGGTNYNEKFKGKATLTADKSSSTAYMQLSSLTSDDSAVYFCARWRGDGYYAYFDVWGAGTTVTVSSGGGGSGGGGSGGGGSDIVLTQSPASLAVSLGQRATISCKASQSVDYDGDSYMNWYQQKPGQPPKLLIYAASNLESGIPARFSGSGSGTDFTLNIHPVEEEDAATYYCQQSNEDPYTFGGGTKLEIKGGGGSGGGGSGGGGSEVQLVESGGGLVQPGNSLRLSCAASGFTFSKFGMSWVRQAPGKGLEWVSSISGSGRDTLYAESVKGRFTISRDNAKTTLYLQMNSLRPEDTAVYYCTIGGSLSVSSQGTLVTVSSGGGGSGGGGSGGGGSQVQLQESGGGLVQAGGSLRLSCAASGRIFSIDIMSWYRQAPGKQRELVARITRGGTISYDDSVKGRFTISRDNAKNTVYLQMNSLKPEDTGVYYCNALYGTDYWGKGTQVTVSSHHHHHHEPEA

SEQ ID NO: 62 - protein, 689 aa, Artificial Sequence
  Description of Artificial Sequence: Synthetic polypeptide
APTSSSTKKTQLQLEHLLLDLQMILNGINNYKNPKLTRMLTFKFYMPKKATELKHLQCLEEELKPLEEVLNLAQSKNFHLRPRDLISNINVIVLELKGSETTFMCEYADETATIVEFLNRWITFCQSIISTLTSGGPGPAGMKGLPGSGGGGSGGGGSGGGGSGGGGSGGGGSDIVLTQSPASLAVSLGQRATISCKASQSVDYDGDSYMNWYQQKPGQPPKLLIYAASNLESGIPARFSGSGSGTDFTLNIHPVEEEDAATYYCQQSNEDPYTFGGGTKLEIKGGGGSGGGGSGGGGSQVQLQQSGAELVRPGTSVKVSCKASGYAFTNYLIEWVKQRPGQGLEWIGVINPGSGGTNYNEKFKGKATLTADKSSSTAYMQLSSLTSDDSAVYFCARWRGDGYYAYFDVWGAGTTVTVSSGGGGSGGGGSGGGGSEVQLVESGGGLVQPGNSLRLSCAASGFTFSKFGMSWVRQAPGKGLEWVSSISGSGRDTLYAESVKGRFTISRDNAKTTLYLQMNSLRPEDTAVYYCTIGGSLSVSSQGTLVTVSSGGGGSGGGGSGGGGSQVQLQESGGGLVQAGGSLRLSCAASGRIFSIDIMSWYRQAPGKQRELVARITRGGTISYDDSVKGRFTISRDNAKNTVYLQMNSLKPEDTGVYYCNALYGTDYWGKGTQVTVSSHHHHHHEPEA

SEQ ID NO: 63 - protein, 272 aa, Unknown
  Description of Unknown: IL2Ra sequence
MDSYLLMWGLLTFIMVPGCQAELCDDDPPEIPHATFKAMAYKEGTMLNCECKRGFRRIKSGSLYMLCTGNSSHSSWDNQCQCTSSATRNTTKQVTPQPEEQKERKTTEMQSPMQPVDQASLPGHCREPPPWENEATERIYHFVVGQMVYYQCVQGYRALHRGPAESVCKMTHGKTRWTQPQLICTGEMETSQFPGEEKPQASPEGRPESETSCLVTTTDFQIQTEMAATMETSIFTTEYQVAVAGCVFLLISVLLLSGLTWQRRQRKSRRTI

SEQ ID NO: 64 - protein, 551 aa, Unknown
  Description of Unknown: IL2Rb sequence
MAAPALSWRLPLLILLLPLATSWASAAVNGTSQFTCFYNSRANISCVWSQDGALQDTSCQVHAWPDRRRWNQTCELLPVSQASWACNLILGAPDSQKLTTVDIVTLRVLCREGVRWRVMAIQDFKPFENLRLMAPISLQVVHVETHRCNISWEISQASHYFERHLEFEARTLSPGHTWEEAPLLTLKQKQEWICLETLTPDTQYEFQVRVKPLQGEFTTWSPWSQPLAFRTKPAALGKDTIPWLGHLLVGLSGAFGFIILVYLLINCRNTGPWLKKVLKCNTPDPSKFFSQLSSEHGGDVQKWLSSPFPSSSFSPGGLAPEISPLEVLERDKVTQLLLQQDKVPEPASLSSNHSLTSCFTNQGYFFFHLPDALEIEACQVYFTYDPYSEEDPDEGVAGAPTGSSPQPLQPLSGEDDAYCTFPSRDDLLLFSPSLLGGPSPPSTAPGGSGAGEERMPPSLQERVPRDWDPQPLGPPTPGVPDLVDFQPPPELVLREAGEEVPDAGPREGVSFPWSRPPGQGEFRALNARLPLNTDAYLSLQELQGQDPTHLV

SEQ ID NO: 65 - protein, 369 aa, Unknown
  Description of Unknown: IL2Rg sequence
MLKPSLPFTSLLFLQLPLLGVGLNTTILTPNGNEDTTADFFLTTMPTDSLSVSTLPLPEVQCFVFNVEYMNCTWNSSSEPQPTNLTLHYWYKNSDNDKVQKCSHYLFSEEITSGCQLQKKEIHLYQTFVVQLQDPREPRRQATQMLKLQNLVIPWAPENLTLHKLSESQLELNWNNRFLNHCLEHLVQYRTDWDHSWTEQSVDYRHKFSLPSVDGQKRYTFRVRSRFNPLCGSAQHWSEWSHPIHWGSNTSKENPFLFALEAVVISVGSMGLIISLLCVYFWLERTMPRIPTLKNLEDLVTEYHGNFSAWSGVSKGLAESLQPDYSERLCLVSEIPPKGGALGEGPGASPCNQHSPYWAPPCYTLKPET

SEQ ID NO: 66 - protein, 520 aa, Artificial Sequence
  Description of Artificial Sequence: Synthetic polypeptide
IWELKKDVYVVELDWYPDAPGEMVVLTCDTPEEDGITWTLDQSSEVLGSGKTLTIQVKEFGDAGQYTCHKGGEVLSHSLLLLHKKEDGIWSTDILKDQKEPKNKTFLRCEAKNYSGRFTCWWLTTISTDLTFSVKSSRGSSDPQGVTCGAATLSAERVRGDNKEYEYSVECQEDSACPAAEESLPIEVMVDAVHKLKYENYTSSFFIRDIIKPDPPKNLQLKPLKNSRQVEVSWEYPDTWSTPHSYFSLTFCVQVQGKSKREKKDRVFTDKTSATVICRKNASISVRAQDRYYSSSWSEWASVPCSGGGGSGGGGSGGGGSRVIPVSGPARCLSQSRNLLKTTDDMVKTAREKLKHYSCTAEDIDHEDITRDQTSTLKTCLPLELHKNESCLATRETSSTTRGSCLPPQKTSLMMTLCLGSIYEDLKMYQTEFQAINAALQNHNHQQIILDKGMLVAIDELMQSLNHNGETLRQKPPVGEADPYRVKMKLCILLHAFSTRVVTINRVMGYLSSAHHHHHH

SEQ ID NO: 67 - protein, 524 aa, Artificial Sequence
  Description of Artificial Sequence: Synthetic polypeptide
IWELKKDVYVVELDWYPDAPGEMVVLTCDTPEEDGITWTLDQSSEVLGSGKTLTIQVKEFGDAGQYTCHKGGEVLSHSLLLLHKKEDGIWSTDILKDQKEPKNKTFLRCEAKNYSGRFTCWWLTTISTDLTFSVKSSRGSSDPQGVTCGAATLSAERVRGDNKEYEYSVECQEDSACPAAEESLPIEVMVDAVHKLKYENYTSSFFIRDIIKPDPPKNLQLKPLKNSRQVEVSWEYPDTWSTPHSYFSLTFCVQVQGKSKREKKDRVFTDKTSATVICRKNASISVRAQDRYYSSSWSEWASVPCSGGGGSGGGGSGGGGSRNLPVATPDPGMFPCLHHSQNLLRAVSNMLQKARQTLEFYPCTSEEIDHEDITKDKTSTVEACLPLELTKNESCLNSRETSFITNGSCLASRKTSFMMALCLSSIYEDLKMYQVEFKTMNAKLLMDPKRQIFLDQNMLAVIDELMQALNFNSETVPQKSSLEEPDFYKTKIKLCILLHAFRIRAVTIDRVMSYLNASHHHHHH

SEQ ID NO: 68 - protein, 940 aa, Artificial Sequence
  Description of Artificial Sequence: Synthetic polypeptide
QSVLTQPPSVSGAPGQRVTISCSGSRSNIGSNTVKWYQQLPGTAPKLLIYYNDQRPSGVPDRFSGSKSGTSASLAITGLQAEDEADYYCQSYDRYTHPALLFGTGTKVTVLGGGGSGGGGSGGGGSQVQLVESGGGVVQPGRSLRLSCAASGFTFSSYGMHWVRQAPGKGLEWVAFIRYDGSNKYYADSVKGRFTISRDNSKNTLYLQMNSLRAEDTAVYYCKTHGSHDNWGQGTMVTVSSGGGGSGGGGSGGGGSGGGGSGGGGSGGGGSSGGPGPAGMKGLPGSIWELKKDVYVVELDWYPDAPGEMVVLTCDTPEEDGITWTLDQSSEVLGSGKTLTIQVKEFGDAGQYTCHKGGEVLSHSLLLLHKKEDGIWSTDILKDQKEPKNKTFLRCEAKNYSGRFTCWWLTTISTDLTFSVKSSRGSSDPQGVTCGAATLSAERVRGDNKEYEYSVECQEDSACPAAEESLPIEVMVDAVHKLKYENYTSSFFIRDIIKPDPPKNLQLKPLKNSRQVEVSWEYPDTWSTPHSYFSLTFCVQVQGKSKREKKDRVFTDKTSATVICRKNASISVRAQDRYYSSSWSEWASVPCSGGGGSGGGGSGGGGSRVIPVSGPARCLSQSRNLLKTTDDMVKTAREKLKHYSCTAEDIDHEDITRDQTSTLKTCLPLELHKNESCLATRETSSTTRGSCLPPQKTSLMMTLCLGSIYEDLKMYQTEFQAINAALQNHNHQQIILDKGMLVAIDELMQSLNHNGETLRQKPPVGEADPYRVKMKLCILLHAFSTRVVTINRVMGYLSSASGGPGPAGMKGLPGSEVQLVESGGGLVQPGNSLRLSCAASGFTFSKFGMSWVRQAPGKGLEWVSSISGSGRDTLYAESVKGRFTISRDNAKTTLYLQMNSLRPEDTAVYYCTIGGSLSVSSQGTLVTVSSHHHHHHEPEA

SEQ ID NO: 69 - protein, 1069 aa, Artificial Sequence
  Description of Artificial Sequence: Synthetic polypeptide
QSVLTQPPSVSGAPGQRVTISCSGSRSNIGSNTVKWYQQLPGTAPKLLIYYNDQRPSGVPDRFSGSKSGTSASLAITGLQAEDEADYYCQSYDRYTHPALLFGTGTKVTVLGGGGSGGGGSGGGGSQVQLVESGGGVVQPGRSLRLSCAASGFTFSSYGMHWVRQAPGKGLEWVAFIRYDGSNKYYADSVKGRFTISRDNSKNTLYLQMNSLRAEDTAVYYCKTHGSHDNWGQGTMVTVSSGGGGSGGGGSGGGGSGGGGSGGGGSGGGGSSGGPGPAGMKGLPGSIWELKKDVYVVELDWYPDAPGEMVVLTCDTPEEDGITWTLDQSSEVLGSGKTLTIQVKEFGDAGQYTCHKGGEVLSHSLLLLHKKEDGIWSTDILKDQKEPKNKTFLRCEAKNYSGRFTCWWLTTISTDLTFSVKSSRGSSDPQGVTCGAATLSAERVRGDNKEYEYSVECQEDSACPAAEESLPIEVMVDAVHKLKYENYTSSFFIRDIIKPDPPKNLQLKPLKNSRQVEVSWEYPDTWSTPHSYFSLTFCVQVQGKSKREKKDRVFTDKTSATVICRKNASISVRAQDRYYSSSWSEWASVPCSGGGGSGGGGSGGGGSRVIPVSGPARCLSQSRNLLKTTDDMVKTAREKLKHYSCTAEDIDHEDITRDQTSTLKTCLPLELHKNESCLATRETSSTTRGSCLPPQKTSLMMTLCLGSIYEDLKMYQTEFQAINAALQNHNHQQIILDKGMLVAIDELMQSLNHNGETLRQKPPVGEADPYRVKMKLCILLHAFSTRVVTINRVMGYLSSASGGPGPAGMKGLPGSEVQLVESGGGLVQPGNSLRLSCAASGFTFSKFGMSWVRQAPGKGLEWVSSISGSGRDTLYAESVKGRFTISRDNAKTTLYLQMNSLRPEDTAVYYCTIGGSLSVSSQGTLVTVSSGGGGSGGGGSGGGGSQVQLQESGGGLAQAGGSLSLSCAASGFTVSNSVMAWYRQTPGKQREFVAIINSVGSTNYADSVKGRFTISRDNAKNTVYLQMNNLKPEDTAVYVCNRNFDRIYWGQGTQVTVSSHHHHHHEPEA

SEQ ID NO: 70 - protein, 1069 aa, Artificial Sequence
  Description of Artificial Sequence: Synthetic polypeptide
QVQLQESGGGLAQAGGSLSLSCAASGFTVSNSVMAWYRQTPGKQREFVAIINSVGSTNYADSVKGRFTISRDNAKNTVYLQMNNLKPEDTAVYVCNRNFDRIYWGQGTQVTVSSGGGGSGGGGSGGGGSQSVLTQPPSVSGAPGQRVTISCSGSRSNIGSNTVKWYQQLPGTAPKLLIYYNDQRPSGVPDRFSGSKSGTSASLAITGLQAEDEADYYCQSYDRYTHPALLFGTGTKVTVLGGGGSGGGGSGGGGSQVQLVESGGGVVQPGRSLRLSCAASGFTFSSYGMHWVRQAPGKGLEWVAFIRYDGSNKYYADSVKGRFTISRDNSKNTLYLQMNSLRAEDTAVYYCKTHGSHDNWGQGTMVTVSSGGGGSGGGGSGGGGSGGGGSGGGGSGGGGSSGGPGPAGMKGLPGSIWELKKDVYVVELDWYPDAPGEMVVLTCDTPEEDGITWTLDQSSEVLGSGKTLTIQVKEFGDAGQYTCHKGGEVLSHSLLLLHKKEDGIWSTDILKDQKEPKNKTFLRCEAKNYSGRFTCWWLTTISTDLTFSVKSSRGSSDPQGVTCGAATLSAERVRGDNKEYEYSVECQEDSACPAAEESLPIEVMVDAVHKLKYENYTSSFFIRDIIKPDPPKNLQLKPLKNSRQVEVSWEYPDTWSTPHSYFSLTFCVQVQGKSKREKKDRVFTDKTSATVICRKNASISVRAQDRYYSSSWSEWASVPCSGGGGSGGGGSGGGGSRVIPVSGPARCLSQSRNLLKTTDDMVKTAREKLKHYSCTAEDIDHEDITRDQTSTLKTCLPLELHKNESCLATRETSSTTRGSCLPPQKTSLMMTLCLGSIYEDLKMYQTEFQAINAALQNHNHQQIILDKGMLVAIDELMQSLNHNGETLRQKPPVGEADPYRVKMKLCILLHAFSTRVVTINRVMGYLSSASGGPGPAGMKGLPGSEVQLVESGGGLVQPGNSLRLSCAASGFTFSKFGMSWVRQAPGKGLEWVSSISGSGRDTLYAESVKGRFTISRDNAKTTLYLQMNSLRPEDTAVYYCTIGGSLSVSSQGTLVTVSSHHHHHHEPEA

SEQ ID NO: 71 - protein, 940 aa, Artificial Sequence
  Description of Artificial Sequence: Synthetic polypeptide
EVQLVESGGGLVQPGNSLRLSCAASGFTFSKFGMSWVRQAPGKGLEWVSSISGSGRDTLYAESVKGRFTISRDNAKTTLYLQMNSLRPEDTAVYYCTIGGSLSVSSQGTLVTVSSGGGGSGGGGSGGGGSQSVLTQPPSVSGAPGQRVTISCSGSRSNIGSNTVKWYQQLPGTAPKLLIYYNDQRPSGVPDRFSGSKSGTSASLAITGLQAEDEADYYCQSYDRYTHPALLFGTGTKVTVLGGGGSGGGGSGGGGSQVQLVESGGGVVQPGRSLRLSCAASGFTFSSYGMHWVRQAPGKGLEWVAFIRYDGSNKYYADSVKGRFTISRDNSKNTLYLQMNSLRAEDTAVYYCKTHGSHDNWGQGTMVTVSSGGGGSGGGGSGGGGSGGGGSGGGGSGGGGSSGGPGPAGMKGLPGSIWELKKDVYVVELDWYPDAPGEMVVLTCDTPEEDGITWTLDQSSEVLGSGKTLTIQVKEFGDAGQYTCHKGGEVLSHSLLLLHKKEDGIWSTDILKDQKEPKNKTFLRCEAKNYSGRFTCWWLTTISTDLTFSVKSSRGSSDPQGVTCGAATLSAERVRGDNKEYEYSVECQEDSACPAAEESLPIEVMVDAVHKLKYENYTSSFFIRDIIKPDPPKNLQLKPLKNSRQVEVSWEYPDTWSTPHSYFSLTFCVQVQGKSKREKKDRVFTDKTSATVICRKNASISVRAQDRYYSSSWSEWASVPCSGGGGSGGGGSGGGGSRVIPVSGPARCLSQSRNLLKTTDDMVKTAREKLKHYSCTAEDIDHEDITRDQTSTLKTCLPLELHKNESCLATRETSSTTRGSCLPPQKTSLMMTLCLGSIYEDLKMYQTEFQAINAALQNHNHQQIILDKGMLVAIDELMQSLNHNGETLRQKPPVGEADPYRVKMKLCILLHAFSTRVVTINRVMGYLSSAHHHHHHEPEA

SEQ ID NO: 72 - protein, 940 aa, Artificial Sequence
  Description of Artificial Sequence: Synthetic polypeptide
EVQLVESGGGLVQPGNSLRLSCAASGFTFSKFGMSWVRQAPGKGLEWVSSISGSGRDTLYAESVKGRFTISRDNAKTTLYLQMNSLRPEDTAVYYCTIGGSLSVSSQGTLVTVSSSGGPGPAGMKGLPGSIWELKKDVYVVELDWYPDAPGEMVVLTCDTPEEDGITWTLDQSSEVLGSGKTLTIQVKEFGDAGQYTCHKGGEVLSHSLLLLHKKEDGIWSTDILKDQKEPKNKTFLRCEAKNYSGRFTCWWLTTISTDLTFSVKSSRGSSDPQGVTCGAATLSAERVRGDNKEYEYSVECQEDSACPAAEESLPIEVMVDAVHKLKYENYTSSFFIRDIIKPDPPKNLQLKPLKNSRQVEVSWEYPDTWSTPHSYFSLTFCVQVQGKSKREKKDRVFTDKTSATVICRKNASISVRAQDRYYSSSWSEWASVPCSGGGGSGGGGSGGGGSRVIPVSGPARCLSQSRNLLKTTDDMVKTAREKLKHYSCTAEDIDHEDITRDQTSTLKTCLPLELHKNESCLATRETSSTTRGSCLPPQKTSLMMTLCLGSIYEDLKMYQTEFQAINAALQNHNHQQIILDKGMLVAIDELMQSLNHNGETLRQKPPVGEADPYRVKMKLCILLHAFSTRVVTINRVMGYLSSASGGPGPAGMKGLPGSGGGGSGGGGSGGGGSGGGGSGGGGSGGGGSQSVLTQPPSVSGAPGQRVTISCSGSRSNIGSNTVKWYQQLPGTAPKLLIYYNDQRPSGVPDRFSGSKSGTSASLAITGLQAEDEADYYCQSYDRYTHPALLFGTGTKVTVLGGGGSGGGGSGGGGSQVQLVESGGGVVQPGRSLRLSCAASGFTFSSYGMHWVRQAPGKGLEWVAFIRYDGSNKYYADSVKGRFTISRDNSKNTLYLQMNSLRAEDTAVYYCKTHGSHDNWGQGTMVTVSSHHHHHHEPEA

SEQ ID NO: 73 - protein, 940 aa, Artificial Sequence
  Description of Artificial Sequence: Synthetic polypeptide
IWELKKDVYVVELDWYPDAPGEMVVLTCDTPEEDGITWTLDQSSEVLGSGKTLTIQVKEFGDAGQYTCHKGGEVLSHSLLLLHKKEDGIWSTDILKDQKEPKNKTFLRCEAKNYSGRFTCWWLTTISTDLTFSVKSSRGSSDPQGVTCGAATLSAERVRGDNKEYEYSVECQEDSACPAAEESLPIEVMVDAVHKLKYENYTSSFFIRDIIKPDPPKNLQLKPLKNSRQVEVSWEYPDTWSTPHSYFSLTFCVQVQGKSKREKKDRVFTDKTSATVICRKNASISVRAQDRYYSSSWSEWASVPCSGGGGSGGGGSGGGGSRVIPVSGPARCLSQSRNLLKTTDDMVKTAREKLKHYSCTAEDIDHEDITRDQTSTLKTCLPLELHKNESCLATRETSSTTRGSCLPPQKTSLMMTLCLGSIYEDLKMYQTEFQAINAALQNHNHQQIILDKGMLVAIDELMQSLNHNGETLRQKPPVGEADPYRVKMKLCILLHAFSTRVVTINRVMGYLSSASGGPGPAGMKGLPGSGGGGSGGGGSGGGGSGGGGSGGGGSGGGGSQSVLTQPPSVSGAPGQRVTISCSGSRSNIGSNTVKWYQQLPGTAPKLLIYYNDQRPSGVPDRFSGSKSGTSASLAITGLQAEDEADYYCQSYDRYTHPALLFGTGTKVTVLGGGGSGGGGSGGGGSQVQLVESGGGVVQPGRSLRLSCAASGFTFSSYGMHWVRQAPGKGLEWVAFIRYDGSNKYYADSVKGRFTISRDNSKNTLYLQMNSLRAEDTAVYYCKTHGSHDNWGQGTMVTVSSGGGGSGGGGSGGGGSEVQLVESGGGLVQPGNSLRLSCAASGFTFSKFGMSWVRQAPGKGLEWVSSISGSGRDTLYAESVKGRFTISRDNAKTTLYLQMNSLRPEDTAVYYCTIGGSLSVSSQGTLVTVSSHHHHHHEPEA

SEQ ID NO: 74 - protein, 328 aa, Homo sapiens
MCHQQLVISWFSLVFLASPLVAIWELKKDVYVVELDWYPDAPGEMVVLTCDTPEEDGITWTLDQSSEVLGSGKTLTIQVKEFGDAGQYTCHKGGEVLSHSLLLLHKKEDGIWSTDILKDQKEPKNKTFLRCEAKNYSGRFTCWWLTTISTDLTFSVKSSRGSSDPQGVTCGAATLSAERVRGDNKEYEYSVECQEDSACPAAEESLPIEVMVDAVHKLKYENYTSSFFIRDIIKPDPPKNLQLKPLKNSRQVEVSWEYPDTWSTPHSYFSLTFCVQVQGKSKREKKDRVFTDKTSATVICRKNASISVRAQDRYYSSSWSEWASVPCS

SEQ ID NO: 75 - protein, 215 aa, Mus musculus
MCQSRYLLFLATLALLNHLSLARVIPVSGPARCLSQSRNLLKTTDDMVKTAREKLKHYSCTAEDIDHEDITRDQTSTLKTCLPLELHKNESCLATRETSSTTRGSCLPPQKTSLMMTLCLGSIYEDLKMYQTEFQAINAALQNHNHQQIILDKGMLVAIDELMQSLNHNGETLRQKPPVGEADPYRVKMKLCILLHAFSTRVVTINRVMGYLSSA

SEQ ID NO: 76 - protein, 862 aa, Unknown
  Description of Unknown: IL12Rb-2 sequence
MAHTFRGCSLAFMFIITWLLIKAKIDACKRGDVTVKPSHVILLGSTVNITCSLKPRQGCFHYSRRNKLILYKFDRRINFHHGHSLNSQVTGLPLGTTLFVCKLACINSDEIQICGAEIFVGVAPEQPQNLSCIQKGEQGTVACTWERGRDTHLYTEYTLQLSGPKNLTWQKQCKDIYCDYLDFGINLTPESPESNFTAKVTAVNSLGSSSSLPSTFTFLDIVRPLPPWDIRIKFQKASVSRCTLYWRDEGLVLLNRLRYRPSNSRLWNMVNVTKAKGRHDLLDLKPFTEYEFQISSKLHLYKGSWSDWSESLRAQTPEEEPTGMLDVWYMKRHIDYSRQQISLFWKNLSVSEARGKILHYQVTLQELTGGKAMTQNITGHTSWTTVIPRTGNWAVAVSAANSKGSSLPTRINIMNLCEAGLLAPRQVSANSEGMDNILVTWQPPRKDPSAVQEYVVEWRELHPGGDTQVPLNWLRSRPYNVSALISENIKSYICYEIRVYALSGDQGGCSSILGNSKHKAPLSGPHINAITEEKGSILISWNSIPVQEQMGCLLHYRIYWKERDSNSQPQLCEIPYRVSQNSHPINSLQPRVTYVLWMTALTAAGESSHGNEREFCLQGKANWMAFVAPSICIAIIMVGIFSTHYFQQKVFVLLAALRPQWCSREIPDPANSTCAKKYPIAEEKTQLPLDRLLIDWPTPEDPEPLVISEVLHQVTPVFRHPPCSNWPQREKGIQGHQASEKDMMHSASSPPPPRALQAESRQLVDLYKVLESRGSDPKPENPACPWTVLPAGDLPTHDGYLPSNIDDLPSHEAPLADSLEELEPQHISLSVFPSSSLHPLTFSCGDKLTLDQLKMRCDSLML

SEQ ID NO: 77 - protein, 662 aa, Unknown
  Description of Unknown: IL12Rb-1 sequence
MEPLVTWVVPLLFLFLLSRQGAACRTSECCFQDPPYPDADSGSASGPRDLRCYRISSDRYECSWQYEGPTAGVSHFLRCCLSSGRCCYFAAGSATRLQFSDQAGVSVLYTVTLWVESWARNQTEKSPEVTLQLYNSVKYEPPLGDIKVSKLAGQLRMEWETPDNQVGAEVQFRHRTPSSPWKLGDCGPQDDDTESCLCPLEMNVAQEFQLRRRQLGSQGSSWSKWSSPVCVPPENPPQPQVRFSVEQLGQDGRRRLTLKEQPTQLELPEGCQGLAPGTEVTYRLQLHMLSCPCKAKATRTLHLGKMPYLSGAAYNVAVISSNQFGPGLNQTWHIPADTHTEPVALNISVGTNGTTMYWPARAQSMTYCIEWQPVGQDGGLATCSLTAPQDPDPAGMATYSWSRESGAMGQEKCYYITIFASAHPEKLTLWSTVLSTYHFGGNASAAGTPHHVSVKNHSLDSVSVDWAPSLLSTCPGVLKEYVVRCRDEDSKQVSEHPVQPTETQVTLSGLRAGVAYTVQVRADTAWLRGVWSQPQRFSIEVQVSDWLIFFASLGSFLSILLVGVLGYLGLNRAARHLCPPLPTPCASSAIEFPGGKETWQWINPVDFQEEASLQEALVVEMSWDKGERTEPLEKTELPEGAPELALDTELSLEDGDRCKAKM

SEQ ID NO: 78 - protein, 328 aa, Homo sapiens; identical to SEQ ID NO: 74

SEQ ID NO: 79 - protein, 335 aa, Mus musculus
MCPQKLTISWFAIVLLVSPLMAMWELEKDVYVVEVDWTPDAPGETVNLTCDTPEEDDITWTSDQRHGVIGSGKTLTITVKEFLDAGQYTCHKGGETLSHSHLLLHKKENGIWSTEILKNFKNKTFLKCEAPNYSGRFTCSWLVQRNMDLKFNIKSSSSSPDSRAVTCGMASLSAEKVTLDQRDYEKYSVSCQEDVTCPTAEETLPIELALEARQQNKYENYSTSFFIRDIIKPDPPKNLQMKPLKNSQVEVSWEYPDSWSTPHSYFSLKFFVRIQRKKEKMKETEEGCNQKGAFLVEKTSTEVQCKGGNVCVQAQDRYYNSSCSKWACVPCRVRS

SEQ ID NO: 80 - protein, 399 aa, Artificial Sequence
  Description of Artificial Sequence: Synthetic polypeptide
EVQLVESGGGLVQPGNSLRLSCAASGFTFSKFGMSWVRQAPGKGLEWVSSISGSGRDTLYAESVKGRFTISRDNAKTTLYLQMNSLRPEDTAVYYCTIGGSLSVSSQGTLVTVSSSGGPGPAGMKGLPGSHGTVIESLESLNNYFNSSGIDVEEKSLFLDIWRNWQKDGDMKILQSQIISFYLRLFEVLKDNQAISNNISVIESHLITTFFSNSKAKKDAFMSIAKFEVNNPQVQRQAFNELIRVVHQLLPESSLRKRKRSRCSGGPGPAGMKGLPGSEVQLVESGGGLVQPGNSLRLSCAASGFTFSKFGMSWVRQAPGKGLEWVSSISGSGRDTLYAESVKGRFTISRDNAKTTLYLQMNSLRPEDTAVYYCTIGGSLSVSSQGTLVTVSSHHHHHH

SEQ ID NO: 81 - protein, 547 aa, Artificial Sequence
  Description of Artificial Sequence: Synthetic polypeptide
EVQLVESGGGLVQPGNSLRLSCAASGFTFSKFGMSWVRQAPGKGLEWVSSISGSGRDTLYAESVKGRFTISRDNAKTTLYLQMNSLRPEDTAVYYCTIGGSLSVSSQGTLVTVSSSGGPGPAGMKGLPGSHGTVIESLESLNNYFNSSGIDVEEKSLFLDIWRNWQKDGDMKILQSQIISFYLRLFEVLKDNQAISNNISVIESHLITTFFSNSKAKKDAFMSIAKFEVNNPQVQRQAFNELIRVVHQLLPESSLRKRKRSRCSGGPGPAGMKGLPGSHGTVIESLESLNNYFNSSGIDVEEKSLFLDIWRNWQKDGDMKILQSQIISFYLRLFEVLKDNQAISNNISVIESHLITTFFSNSKAKKDAFMSIAKFEVNNPQVQRQAFNELIRVVHQLLPESSLRKRKRSRCSGGPGPAGMKGLPGSEVQLVESGGGLVQPGNSLRLSCAASGFTFSKFGMSWVRQAPGKGLEWVSSISGSGRDTLYAESVKGRFTISRDNAKTTLYLQMNSLRPEDTAVYYCTIGGSLSVSSQGTLVTVSSHHHHHH

SEQ ID NO: 82 - protein, 547 aa, Artificial Sequence
  Description of Artificial Sequence: Synthetic polypeptide
EVQLVESGGGLVQPGNSLRLSCAASGFTFSKFGMSWVRQAPGKGLEWVSSISGSGRDTLYAESVKGRFTISRDNAKTTLYLQMNSLRPEDTAVYYCTIGGSLSVSSQGTLVTVSSSGGPGPAGMKGLPGSHGTVIESLESLNNYFNSSGIDVEEKSLFLDIWRNWQKDGDMKILQSQIISFYLRLFEVLKDNQAISNNISVIESHLITTFFSNSKAKKDAFMSIAKFEVNNPQVQRQAFNELIRVVHQLLPESSLRKRKRSRCGGGGSGGGGSGGGGSHGTVIESLESLNNYFNSSGIDVEEKSLFLDIWRNWQKDGDMKILQSQIISFYLRLFEVLKDNQAISNNISVIESHLITTFFSNSKAKKDAFMSIAKFEVNNPQVQRQAFNELIRVVHQLLPESSLRKRKRSRCSGGPGPAGMKGLPGSEVQLVESGGGLVQPGNSLRLSCAASGFTFSKFGMSWVRQAPGKGLEWVSSISGSGRDTLYAESVKGRFTISRDNAKTTLYLQMNSLRPEDTAVYYCTIGGSLSVSSQGTLVTVSSHHHHHH

SEQ ID NO: 83 - protein, 166 aa, Homo sapiens
MKYTSYILAFQLCIVLGSLGCYCQDPYVKEAENLKKYFNAGHSDVADNGTLFLGILKNWKEESDRKIMQSQIVSFYFKLFKNFKDDQSIQKSVETIKEDMNVKFFNSNKKKRDDFEKLTNYSVTDLNVQRKAIHELIQVMAELSPAAKTGKRKRSQMLFRGRRASQ

SEQ ID NO: 84 - protein, 155 aa, Mus musculus
MNATHCILALQLFLMAVSGCYCHGTVIESLESLNNYFNSSGIDVEEKSLFLDIWRNWQKDGDMKILQSQIISFYLRLFEVLKDNQAISNNISVIESHLITTFFSNSKAKKDAFMSIAKFEVNNPQVQRQAFNELIRVVHQLLPESSLRKRKRSRC

SEQ ID NO: 85 - protein, 699 aa, Artificial Sequence
  Description of Artificial Sequence: Synthetic polypeptide
MDMRVPAQLLGLLLLWLRGARCEVQLVESGGGLVQPGNSLRLSCAASGFTFSKFGMSWVRQAPGKGLEWVSSISGSGRDTLYAESVKGRFTISRDNAKTTLYLQMNSLRPEDTAVYYCTIGGSLSVSSQGTLVTVSSSGGPGPAGMKGLPGSHGTVIESLESLNNYFNSSGIDVEEKSLFLDIWRNWQKDGDMKILQSQIISFYLRLFEVLKDNQAISNNISVIESHLITTFFSNSKAKKDAFMSIAKFEVNNPQVQRQAFNELIRVVHQLLPESSLRKRKRSRCSGGPGPAGMKGLPGSEVQLVESGGGLVQPGNSLRLSCAASGFTFSKFGMSWVRQAPGKGLEWVSSISGSGRDTLYAESVKGRFTISRDNAKTTLYLQMNSLRPEDTAVYYCTIGGSLSVSSQGTLVTVSSSGGPGPAGMKGLPGSHGTVIESLESLNNYFNSSGIDVEEKSLFLDIWRNWQKDGDMKILQSQIISFYLRLFEVLKDNQAISNNISVIESHLITTFFSNSKAKKDAFMSIAKFEVNNPQVQRQAFNELIRVVHQLLPESSLRKRKRSRCSGGPGPAGMKGLPGSEVQLVESGGGLVQPGNSLRLSCAASGFTFSKFGMSWVRQAPGKGLEWVSSISGSGRDTLYAESVKGRFTISRDNAKTTLYLQMNSLRPEDTAVYYCTIGGSLSVSSQGTLVTVSSHHHHHH

SEQ ID NO: 86 - protein, 436 aa, Artificial Sequence
  Description of Artificial Sequence: Synthetic polypeptide
EVQLVESGGGLVQPGNSLRLSCAASGFTFSKFGMSWVRQAPGKGLEWVSSISGSGRDTLYAESVKGRFTISRDNAKTTLYLQMNSLRPEDTAVYYCTIGGSLSVSSQGTLVTVSSSGGPGPAGMKGLPGSCDLPQTHNLRNKRALTLLVQMRRLSPLSCLKDRKDFGFPQEKVDAQQIKKAQAIPVLSELTQQILNIFTSKDSSAAWNTTLLDSFCNDLHQQLNDLQGCLMQQVGVQEFPLTQEDALLAVRKYFHRITVYLREKKHSPCAWEVVRAEVWRALSSSANVLGRLREEKSGGPGPAGMKGLPGSEVQLVESGGGLVQPGNSLRLSCAASGFTFSKFGMSWVRQAPGKGLEWVSSISGSGRDTLYAESVKGRFTISRDNAKTTLYLQMNSLRPEDTAVYYCTIGGSLSVSSQGTLVTVSSHHHHHHEPEA

SEQ ID NO: 87 - protein, 428 aa, Artificial Sequence
  Description of Artificial Sequence: Synthetic polypeptide
EVQLVESGGGLVQPGNSLRLSCAASGFTFSKFGMSWVRQAPGKGLEWVSSISGSGRDTLYAESVKGRFTISRDNAKTTLYLQMNSLRPEDTAVYYCTIGGSLSVSSQGTLVTVSSSGGPGPAGMKGLPGSCDLPQTHNLRNKRALTLLVQMRRLSPLSCLKDRKDFGFPQEKVDAQQIKKAQAIPVLSELTQQILNIFTSKDSSAAWNTTLLDSFCNDLHQQLNDLQGCLMQQVGVQEFPLTQEDALLAVRKYFHRITVYLREKKHSPCAWEVVRAEVWRALSSSANVSGGPGPAGMKGLPGSEVQLVESGGGLVQPGNSLRLSCAASGFTFSKFGMSWVRQAPGKGLEWVSSISGSGRDTLYAESVKGRFTISRDNAKTTLYLQMNSLRPEDTAVYYCTIGGSLSVSSQGTLVTVSSHHHHHHEPEA

SEQ ID NO: 88 - protein, 489 aa, Unknown
  Description of Unknown: IFNgR1 sequence
MALLFLLPLVMQGVSRAEMGTADLGPSSVPTPTNVTIESYNMNPIVYWEYQIMPQVPVFTVEVKNYGVKNSEWIDACINISHHYCNISDHVGDPSNSLWVRVKARVGQKESAYAKSEEFAVCRDGKIGPPKLDIRKEEKQIMIDIFHPSVFVNGDEQEVDYDPETTCYIRVYNVYVRMNGSEIQYKILTQKEDDCDEIQCQLAIPVSSLNSQYCVSAEGVLHVWGVTTEKSKEVCITIFNSSIKGSLWIPVVAALLLFLVLSLVFICFYIKKINPLKEKSIILPKSLISVVRSATLETKPESKYVSLITSYQPFSLEKEVVCEEPLSPATVPGMHTEDNPGKVEHTEELSSITEVVTTEENIPDVVPGSHLTPIERESSSPLSSNQSEPGSIALNSYHSRNCSESDHSRNGFDTDSSCLESHSSLSDSEFPPNNKGEIKTEGQELITVIKAPTSFGYDKPHVLVDLLVDDSGKESLIGYRPTEDSKEFS

SEQ ID NO: 89 - protein, 337 aa, Unknown
  Description of Unknown: IFNgR2 sequence
MRPTLLWSLLLLLGVFAAAAAAPPDPLSQLPAPQHPKIRLYNAEQVLSWEPVALSNSTRPVVYQVQFKYTDSKWFTADIMSIGVNCTQITATECDFTAASPSAGFPMDFNVTLRLRAELGALHSAWVTMPWFQHYRNVTVGPPENIEVTPGEGSLIIRFSSPFDIADTSTAFFCYYVHYWEKGGIQQVKGPFRSNSISLDNLKPSRVYCLQVQAQLLWNKSNIFRVGHLSNISCYETMADASTELQQVILISVGTFSLLSVLAGACFFLVLKYRGLIKYWFHTPPSIPLQIEEYLKDPTQPILEALDKDSSPKDDVWDSVSIISFPEKEQEDVLQTL

SEQ ID NO: 90 - protein, 528 aa, Artificial Sequence
  Description of Artificial Sequence: Synthetic polypeptide
QVQLQESGGGLVQAGGSLRLSCAASGRIFSIDIMSWYRQAPGKQRELVARITRGGTISYDDSVKGRFTISRDNAKNTVYLQMNSLKPEDTGVYYCNALYGTDYWGKGTQVTVSSGGGGSGGGGSGGGGSEVQLVESGGGLVQPGNSLRLSCAASGFTFSKFGMSWVRQAPGKGLEWVSSISGSGRDTLYAESVKGRFTISRDNAKTTLYLQMNSLRPEDTAVYYCTIGGSLSVSSQGTLVTVSSSGGPGPAGMKGLPGSHGTVIESLESLNNYFNSSGIDVEEKSLFLDIWRNWQKDGDMKILQSQIISFYLRLFEVLKDNQAISNNISVIESHLITTFFSNSKAKKDAFMSIAKFEVNNPQVQRQAFNELIRVVHQLLPESSLRKRKRSRCSGGPGPAGMKGLPGSEVQLVESGGGLVQPGNSLRLSCAASGFTFSKFGMSWVRQAPGKGLEWVSSISGSGRDTLYAESVKGRFTISRDNAKTTLYLQMNSLRPEDTAVYYCTIGGSLSVSSQGTLVTVSSHHHHHH

SEQ ID NO: 91 - protein, 658 aa, Artificial Sequence
  Description of Artificial Sequence: Synthetic polypeptide
EVQLVESGGGLVQPGNSLRLSCAASGFTFSKFGMSWVRQAPGKGLEWVSSISGSGRDTLYAESVKGRFTISRDNAKTTLYLQMNSLRPEDTAVYYCTIGGSLSVSSQGTLVTVSSSGGPGPAGMKGLPGSHGTVIESLESLNNYFNSSGIDVEEKSLFLDIWRNWQKDGDMKILQSQIISFYLRLFEVLKDNQAISNNISVIESHLITTFFSNSKAKKDAFMSIAKFEVNNPQVQRQAFNELIRVVHQLLPESSLRKRKRSRCSGGPGPAGMKGLPGSEVQLVESGGGLVQPGNSLRLSCAASGFTFSKFGMSWVRQAPGKGLEWVSSISGSGRDTLYAESVKGRFTISRDNAKTTLYLQMNSLRPEDTAVYYCTIGGSLSVSSQGTLVTVSSSGGPGPAGMKGLPGSEVQLVESGGGLVQPGNSLRLSCAASGFTFSKFGMSWVRQAPGKGLEWVSSISGSGRDTLYAESVKGRFTISRDNAKTTLYLQMNSLRPEDTAVYYCTIGGSLSVSSQGTLVTVSSGGGGSGGGGSGGGGSQVQLQESGGGLVQAGGSLRLSCAASGRIFSIDIMSWYRQAPGKQRELVARITRGGTISYDDSVKGRFTISRDNAKNTVYLQMNSLKPEDTGVYYCNALYGTDYWGKGTQVTVSSHHHHHH

SEQ ID NO: 92 - protein, 1337 aa, Artificial Sequence
  Description of Artificial Sequence: Synthetic polypeptide
EAHKSEIAHRYNDLGEQHFKGLVLIAFSQYLQKCSYDEHAKLVQEVTDFAKTCVADESAANCDKSLHTLFGDKLCAIPNLRENYGELADCCTKQEPERNECFLQHKDDNPSLPPFERPEAEAMCTSFKENPTTFMGHYLHEVARRHPYFYAPELLYYAEQYNEILTQCCAEADKESCLTPKLDGVKEKALVSSVRQRMKCSSMQKFGERAFKAWAVARLSQTFPNADFAEITKLATDLTKVNKECCHGDLLECADDRAELAKYMCENQATISSKLQTCCDKPLLKKAHCLSEVEHDTMPADLPAIAADFVEDQEVCKNYAEAKDVFLGTFLYEYSRRHPDYSVSLLLRLAKKYEATLEKCCAEANPPACYGTVLAEFQPLVEEPKNLVKTNCDLYEKLGEYGFQNAILVRYTQKAPQVSTPTLVEAARNLGRVGTKCCTLPEDQRLPCVEDYLSAILNRVCLLHEKTPVSEHVTKCCSGSLVERRPCFSALTVDETYVPKEFKAETFTFHSDICTLPEKEKQIKKQTALAELVKHKPKATAEQLKTVMDDFAQFLDTCCKAADKDTCFSTEGPNLVTRCKDALASGGPGPAGMKGLPGSHGTVIESLESLNNYFNSSGIDVEEKSLFLDIWRNWQKDGDMKILQSQIISFYLRLFEVLKDNQAISNNISVIESHLITTFFSNSKAKKDAFMSIAKFEVNNPQVQRQAFNELIRVVHQLLPESSLRKRKRSRCSGGPGPAGMKGLPGSEAHKSEIAHRYNDLGEQHFKGLVLIAFSQYLQKCSYDEHAKLVQEVTDFAKTCVADESAANCDKSLHTLFGDKLCAIPNLRENYGELADCCTKQEPERNECFLQHKDDNPSLPPFERPEAEAMCTSFKENPTTFMGHYLHEVARRHPYFYAPELLYYAEQYNEILTQCCAEADKESCLTPKLDGVKEKALVSSVRQRMKCSSMQKFGERAFKAWAVARLSQTFPNADFAEITKLATDLTKVNKECCHGDLLECADDRAELAKYMCENQATISSKLQTCCDKPLLKKAHCLSEVEHDTMPADLPAIAADFVEDQEVCKNYAEAKDVFLGTFLYEYSRRHPDYSVSLLLRLAKKYEATLEKCCAEANPPACYGTVLAEFQPLVEEPKNLVKTNCDLYEKLGEYGFQNAILVRYTQKAPQVSTPTLVEAARNLGRVGTKCCTLPEDQRLPCVEDYLSAILNRVCLLHEKTPVSEHVTKCCSGSLVERRPCFSALTVDETYVPKEFKAETFTFHSDICTLPEKEKQIKKQTALAELVKHKPKATAEQLKTVMDDFAQFLDTCCKAADKDTCFSTEGPNLVTRCKDALAHHHHHH

SEQ ID NO: 93 - protein, 1485 aa, Artificial Sequence
  Description of Artificial Sequence: Synthetic polypeptide
EAHKSEIAHRYNDLGEQHFKGLVLIAFSQYLQKCSYDEHAKLVQEVTDFAKTCVADESAANCDKSLHTLFGDKLCAIPNLRENYGELADCCTKQEPERNECFLQHKDDNPSLPPFERPEAEAMCTSFKENPTTFMGHYLHEVARRHPYFYAPELLYYAEQYNEILTQCCAEADKESCLTPKLDGVKEKALVSSVRQRMKCSSMQKFGERAFKAWAVARLSQTFPNADFAEITKLATDLTKVNKECCHGDLLECADDRAELAKYMCENQATISSKLQTCCDKPLLKKAHCLSEVEHDTMPADLPAIAADFVEDQEVCKNYAEAKDVFLGTFLYEYSRRHPDYSVSLLLRLAKKYEATLEKCCAEANPPACYGTVLAEFQPLVEEPKNLVKTNCDLYEKLGEYGFQNAILVRYTQKAPQVSTPTLVEAARNLGRVGTKCCTLPEDQRLPCVEDYLSAILNRVCLLHEKTPVSEHVTKCCSGSLVERRPCFSALTVDETYVPKEFKAETFTFHSDICTLPEKEKQIKKQTALAELVKHKPKATAEQLKTVMDDFAQFLDTCCKAADKDTCFSTEGPNLVTRCKDALASGGPGPAGMKGLPGSHGTVIESLESLNNYFNSSGIDVEEKSLFLDIWRNWQKDGDMKILQSQIISFYLRLFEVLKDNQAISNNISVIESHLITTFFSNSKAKKDAFMSIAKFEVNNPQVQRQAFNELIRVVHQLLPESSLRKRKRSRCGGGGSGGGGSGGGGSHGTVIESLESLNNYFNSSGIDVEEKSLFLDIWRNWQKDGDMKILQSQIISFYLRLFEVLKDNQAISNNISVIESHLITTFFSNSKAKKDAFMSIAKFEVNNPQVQRQAFNELIRVVHQLLPESSLRKRKRSRCSGGPGPAGMKGLPGSEAHKSEIAHRYNDLGEQHFKGLVLIAFSQYLQKCSYDEHAKLVQEVTDFAKTCVADESAANCDKSLHTLFGDKLCAIPNLRENYGELADCCTKQEPERNECFLQHKDDNPSLPPFERPEAEAMCTSFKENPTTFMGHYLHEVARRHPYFYAPELLYYAEQYNEILTQCCAEADKESCLTPKLDGVKEKALVSSVRQRMKCSSMQKFGERAFKAWAVARLSQTFPNADFAEITKLATDLTKVNKECCHGDLLECADDRAELAKYMCENQATISSKLQTCCDKPLLKKAHCLSEVEHDTMPADLPAIAADFVEDQEVCKNYAEAKDVFLGTFLYEYSRRHPDYSVSLLLRLAKKYEATLEKCCAEANPPACYGTVLAEFQPLVEEPKNLVKTNCDLYEKLGEYGFQNAILVRYTQKAPQVSTPTLVEAARNLGRVGTKCCTLPEDQRLPCVEDYLSAILNRVCLLHEKTPVSEHVTKCCSGSLVERRPCFSALTVDETYVPKEFKAETFTFHSDICTLPEKEKQIKKQTALAELVKHKPKATAEQLKTVMDDFAQFLDTCCKAADKDTCFSTEGPNLVTRCKDALAHHHHHH

SEQ ID NO: 94 - protein, 698 aa, Artificial Sequence
  Description of Artificial Sequence: Synthetic polypeptide
MDMRVPAQLLGLLLLWLRGARCQVQLQESGGGLVQAGGSLRLSCAASGRIFSIDIMSWYRQAPGKQRELVARITRGGTISYDDSVKGRFTISRDNAKNTVYLQMNSLKPEDTGVYYCNALYGTDYWGKGTQVTVSSGGGGSGGGGSGGGGSEVQLVESGGGLVQPGNSLRLSCAASGFTFSKFGMSWVRQAPGKGLEWVSSISGSGRDTLYAESVKGRFTISRDNAKTTLYLQMNSLRPEDTAVYYCTIGGSLSVSSQGTLVTVSSSGGPGPAGMKGLPGSHGTVIESLESLNNYFNSSGIDVEEKSLFLDIWRNWQKDGDMKILQSQIISFYLRLFEVLKDNQAISNNISVIESHLITTFFSNSKAKKDAFMSIAKFEVNNPQVQRQAFNELIRVVHQLLPESSLRKRKRSRCGGGGSGGGGSGGGGSHGTVIESLESLNNYFNSSGIDVEEKSLFLDIWRNWQKDGDMKILQSQIISFYLRLFEVLKDNQAISNNISVIESHLITTFFSNSKAKKDAFMSIAKFEVNNPQVQRQAFNELIRVVHQLLPESSLRKRKRSRCSGGPGPAGMKGLPGSEVQLVESGGGLVQPGNSLRLSCAASGFTFSKFGMSWVRQAPGKGLEWVSSISGSGRDTLYAESVKGRFTISRDNAKTTLYLQMNSLRPEDTAVYYCTIGGSLSVSSQGTLVTVSSHHHHHH

SEQ ID NO: 95 - protein, 699 aa, Artificial Sequence; identical to SEQ ID NO: 85
  Description of Artificial Sequence: Synthetic polypeptide

SEQ ID NO: 96 - protein, 554 aa, Artificial Sequence
  Description of Artificial Sequence: Synthetic polypeptide
MDMRVPAQLLGLLLLWLRGARCQVQLQESGGGLAQAGGSLSLSCAASGFTVSNSVMAWYRQTPGKQREFVAIINSVGSTNYADSVKGRFTISRDNAKNTVYLQMNNLKPEDTAVYVCNRNFDRIYWGQGTQVTVSSGGGGSGGGGSGGGGSEVQLVESGGGLVQPGNSLRLSCAASGFTFSKFGMSWVRQAPGKGLEWVSSISGSGRDTLYAESVKGRFTISRDNAKTTLYLQMNSLRPEDTAVYYCTIGGSLSVSSQGTLVTVSSSGGPGPAGMKGLPGSHGTVIESLESLNNYFNSSGIDVEEKSLFLDIWRNWQKDGDMKILQSQIISFYLRLFEVLKDNQAISNNISVIESHLITTFFSNSKAKKDAFMSIAKFEVNNPQVQRQAFNELIRVVHQLLPESSLRKRKRSRCSGGPGPAGMKGLPGSEVQLVESGGGLVQPGNSLRLSCAASGFTFSKFGMSWVRQAPGKGLEWVSSISGSGRDTLYAESVKGRFTISRDNAKTTLYLQMNSLRPEDTAVYYCTIGGSLSVSSQGTLVTVSSHHHHHHEPEA

SEQ ID NO: 97 - protein, 554 aa, Artificial Sequence
  Description of Artificial Sequence: Synthetic polypeptide
MDMRVPAQLLGLLLLWLRGARCEVQLVESGGGLVQPGNSLRLSCAASGFTFSKFGMSWVRQAPGKGLEWVSSISGSGRDTLYAESVKGRFTISRDNAKTTLYLQMNSLRPEDTAVYYCTIGGSLSVSSQGTLVTVSSSGGPGPAGMKGLPGSHGTVIESLESLNNYFNSSGIDVEEKSLFLDIWRNWQKDGDMKILQSQIISFYLRLFEVLKDNQAISNNISVIESHLITTFFSNSKAKKDAFMSIAKFEVNNPQVQRQAFNELIRVVHQLLPESSLRKRKRSRCSGGPGPAGMKGLPGSEVQLVESGGGLVQPGNSLRLSCAASGFTFSKFGMSWVRQAPGKGLEWVSSISGSGRDTLYAESVKGRFTISRDNAKTTLYLQMNSLRPEDTAVYYCTIGGSLSVSSQGTLVTVSSGGGGSGGGGSGGGGSQVQLQESGGGLAQAGGSLSLSCAASGFTVSNSVMAWYRQTPGKQREFVAIINSVGSTNYADSVKGRFTISRDNAKNTVYLQMNNLKPEDTAVYVCNRNFDRIYWGQGTQVTVSSHHHHHHEPEA

SEQ ID NO: 98 - protein, 702 aa, Artificial Sequence
  Description of Artificial Sequence: Synthetic polypeptide
MDMRVPAQLLGLLLLWLRGARCEVQLVESGGGLVQPGNSLRLSCAASGFTFSKFGMSWVRQAPGKGLEWVSSISGSGRDTLYAESVKGRFTISRDNAKTTLYLQMNSLRPEDTAVYYCTIGGSLSVSSQGTLVTVSSSGGPGPAGMKGLPGSHGTVIESLESLNNYFNSSGIDVEEKSLFLDIWRNWQKDGDMKILQSQIISFYLRLFEVLKDNQAISNNISVIESHLITTFFSNSKAKKDAFMSIAKFEVNNPQVQRQAFNELIRVVHQLLPESSLRKRKRSRCSGGPGPAGMKGLPGSHGTVIESLESLNNYFNSSGIDVEEKSLFLDIWRNWQKDGDMKILQSQIISFYLRLFEVLKDNQAISNNISVIESHLITTFFSNSKAKKDAFMSIAKFEVNNPQVQRQAFNELIRVVHQLLPESSLRKRKRSRCSGGPGPAGMKGLPGSEVQLVESGGGLVQPGNSLRLSCAASGFTFSKFGMSWVRQAPGKGLEWVSSISGSGRDTLYAESVKGRFTISRDNAKTTLYLQMNSLRPEDTAVYYCTIGGSLSVSSQGTLVTVSSGGGGSGGGGSGGGGSQVQLQESGGGLVQAGGSLRLSCAASGRIFSIDIMSWYRQAPGKQRELVARITRGGTISYDDSVKGRFTISRDNAKNTVYLQMNSLKPEDTGVYYCNALYGTDYWGKGTQVTVSSHHHHHHEPEA

SEQ ID NO: 99 - protein, 702 aa, Artificial Sequence
  Description of Artificial Sequence: Synthetic polypeptide
MDMRVPAQLLGLLLLWLRGARCQVQLQESGGGLAQAGGSLSLSCAASGFTVSNSVMAWYRQTPGKQREFVAIINSVGSTNYADSVKGRFTISRDNAKNTVYLQMNNLKPEDTAVYVCNRNFDRIYWGQGTQVTVSSGGGGSGGGGSGGGGSEVQLVESGGGLVQPGNSLRLSCAASGFTFSKFGMSWVRQAPGKGLEWVSSISGSGRDTLYAESVKGRFTISRDNAKTTLYLQMNSLRPEDTAVYYCTIGGSLSVSSQGTLVTVSSSGGPGPAGMKGLPGSHGTVIESLESLNNYFNSSGIDVEEKSLFLDIWRNWQKDGDMKILQSQIISFYLRLFEVLKDNQAISNNISVIESHLITTFFSNSKAKKDAFMSIAKFEVNNPQVQRQAFNELIRVVHQLLPESSLRKRKRSRCSGGPGPAGMKGLPGSHGTVIESLESLNNYFNSSGIDVEEKSLFLDIWRNWQKDGDMKILQSQIISFYLRLFEVLKDNQAISNNISVIESHLITTFFSNSKAKKDAFMSIAKFEVNNPQVQRQAFNELIRVVHQLLPESSLRKRKRSRCSGGPGPAGMKGLPGSEVQLVESGGGLVQPGNSLRLSCAASGFTFSKFGMSWVRQAPGKGLEWVSSISGSGRDTLYAESVKGRFTISRDNAKTTLYLQMNSLRPEDTAVYYCTIGGSLSVSSQGTLVTVSSHHHHHHEPEA

SEQ ID NO: 100 - protein, 702 aa, Artificial Sequence
  Description of Artificial Sequence: Synthetic polypeptide
MDMRVPAQLLGLLLLWLRGARCEVQLVESGGGLVQPGNSLRLSCAASGFTFSKFGMSWVRQAPGKGLEWVSSISGSGRDTLYAESVKGRFTISRDNAKTTLYLQMNSLRPEDTAVYYCTIGGSLSVSSQGTLVTVSSSGGPGPAGMKGLPGSHGTVIESLESLNNYFNSSGIDVEEKSLFLDIWRNWQKDGDMKILQSQIISFYLRLFEVLKDNQAISNNISVIESHLITTFFSNSKAKKDAFMSIAKFEVNNPQVQRQAFNELIRVVHQLLPESSLRKRKRSRCSGGPGPAGMKGLPGSHGTVIESLESLNNYFNSSGIDVEEKSLFLDIWRNWQKDGDMKILQSQIISFYLRLFEVLKDNQAISNNISVIESHLITTFFSNSKAKKDAFMSIAKFEVNNPQVQRQAFNELIRVVHQLLPESSLRKRKRSRCSGGPGPAGMKGLPGSEVQLVESGGGLVQPGNSLRLSCAASGFTFSKFGMSWVRQAPGKGLEWVSSISGSGRDTLYAESVKGRFTISRDNAKTTLYLQMNSLRPEDTAVYYCTIGGSLSVSSQGTLVTVSSGGGGSGGGGSGGGGSQVQLQESGGGLAQAGGSLSLSCAASGFTVSNSVMAWYRQTPGKQREFVAIINSVGSTNYADSVKGRFTISRDNAKNTVYLQMNNLKPEDTAVYVCNRNFDRIYWGQGTQVTVSSHHHHHHEPEA

SEQ ID NO: 101 - protein, 832 aa, Artificial Sequence
  Description of Artificial Sequence: Synthetic polypeptide
MDMRVPAQLLGLLLLWLRGARCEVQLVESGGGLVQPGNSLRLSCAASGFTFSKFGMSWVRQAPGKGLEWVSSISGSGRDTLYAESVKGRFTISRDNAKTTLYLQMNSLRPEDTAVYYCTIGGSLSVSSQGTLVTVSSSGGPGPAGMKGLPGSHGTVIESLESLNNYFNSSGIDVEEKSLFLDIWRNWQKDGDMKILQSQIISFYLRLFEVLKDNQAISNNISVIESHLITTFFSNSKAKKDAFMSIAKFEVNNPQVQRQAFNELIRVVHQLLPESSLRKRKRSRCSGGPGPAGMKGLPGSHGTVIESLESLNNYFNSSGIDVEEKSLFLDIWRNWQKDGDMKILQSQIISFYLRLFEVLKDNQAISNNISVIESHLITTFFSNSKAKKDAFMSIAKFEVNNPQVQRQAFNELIRVVHQLLPESSLRKRKRSRCSGGPGPAGMKGLPGSEVQLVESGGGLVQPGNSLRLSCAASGFTFSKFGMSWVRQAPGKGLEWVSSISGSGRDTLYAESVKGRFTISRDNAKTTLYLQMNSLRPEDTAVYYCTIGGSLSVSSQGTLVTVSSGGGGSGGGGSGGGGSEVQLVESGGGLVQPGGSLRLSCAASGFTFSSYAMSWVRQAPGKGLEWVSAISGSGGSTYYADSVKGRFTISRDNSKNTLYLQMNSLRAEDTAVYYCARGVGAFRPYRKHEWGQGTLVTVSRGGGGSGGGGSGGGGSSSELTQDPAVSVALGQTVRITCQGDSLRSYYASWYQQKPGQAPVLVIYGKNNRPSGIPDRFSGSSSGNTASLTTTGAQAEDEADYYCNSSPFEHNLVVFGGGTKLTVLHHHHHHEPEA

SEQ ID NO: 102 - protein, 276 aa, Artificial Sequence
  Description of Artificial Sequence: Synthetic polypeptide
MDMRVPAQLLGLLLLWLRGARCEVQLVESGGGLVQPGGSLRLSCAASGFTFSSYAMSWVRQAPGKGLEWVSAISGSGGSTYYADSVKGRFTISRDNSKNTLYLQMNSLRAEDTAVYYCARGVGAFRPYRKHEWGQGTLVTVSRGGGGSGGGGSGGGGSSSELTQDPAVSVALGQTVRITCQGDSLRSYYASWYQQKPGQAPVLVIYGKNNRPSGIPDRFSGSSSGNTASLTTTGAQAEDEADYYCNSSPFEHNLVVFGGGTKLTVLHHHHHHEPEA

SEQ ID NO: 103 - protein, 573 aa, Artificial Sequence
  Description of Artificial Sequence: Synthetic polypeptide
MDMRVPAQLLGLLLLWLRGARCEVQLVESGGGLVQPGNSLRLSCAASGFTFSKFGMSWVRQAPGKGLEWVSSISGSGRDTLYAESVKGRFTISRDNAKTTLYLQMNSLRPEDTAVYYCTIGGSLSVSSQGTLVTVSSSGGPGPAGMKGLPGSHGTVIESLESLNNYFNSSGIDVEEKSLFLDIWRNWQKDGDMKILQSQIISFYLRLFEVLKDNQAISNNISVIESHLITTFFSNSKAKKDAFMSIAKFEVNNPQVQRQAFNELIRVVHQLLPESSLRKRKRSRCSGGPGPAGMKGLPGSEVQLVESGGGLVQPGNSLRLSCAASGFTFSKFGMSWVRQAPGKGLEWVSSISGSGRDTLYAESVKGRFTISRDNAKTTLYLQMNSLRPEDTAVYYCTIGGSLSVSSQGTLVTVSSSGGPGPAGMKGLPGSHGTVIESLESLNNYFNSSGIDVEEKSLFLDIWRNWQKDGDMKILQSQIISFYLRLFEVLKDNQAISNNISVIESHLITTFFSNSKAKKDAFMSIAKFEVNNPQVQRQAFNELIRVVHQLLPESSLRKRKRSRCHHHHHHEPEA

SEQ ID NO: 104 - protein, 573 aa, Artificial Sequence
  Description of Artificial Sequence: Synthetic polypeptide
MDMRVPAQLLGLLLLWLRGARCHGTVIESLESLNNYFNSSGIDVEEKSLFLDIWRNWQKDGDMKILQSQIISFYLRLFEVLKDNQAISNNISVIESHLITTFFSNSKAKKDAFMSIAKFEVNNPQVQRQAFNELIRVVHQLLPESSLRKRKRSRCSGGPGPAGMKGLPGSEVQLVESGGGLVQPGNSLRLSCAASGFTFSKFGMSWVRQAPGKGLEWVSSISGSGRDTLYAESVKGRFTISRDNAKTTLYLQMNSLRPEDTAVYYCTIGGSLSVSSQGTLVTVSSSGGPGPAGMKGLPGSHGTVIESLESLNNYFNSSGIDVEEKSLFLDIWRNWQKDGDMKILQSQIISFYLRLFEVLKDNQAISNNISVIESHLITTFFSNSKAKKDAFMSIAKFEVNNPQVQRQAFNELIRVVHQLLPESSLRKRKRSRCSGGPGPAGMKGLPGSEVQLVESGGGLVQPGNSLRLSCAASGFTFSKFGMSWVRQAPGKGLEWVSSISGSGRDTLYAESVKGRFTISRDNAKTTLYLQMNSLRPEDTAVYYCTIGGSLSVSSQGTLVTVSSHHHHHHEPEA

SEQ ID NO: 105 - protein, 1511 aa, Artificial Sequence
  Description of Artificial Sequence: Synthetic polypeptide
MDMRVPAQLLGLLLLWLRGARCHGTVIESLESLNNYFNSSGIDVEEKSLFLDIWRNWQKDGDMKILQSQIISFYLRLFEVLKDNQAISNNISVIESHLITTFFSNSKAKKDAFMSIAKFEVNNPQVQRQAFNELIRVVHQLLPESSLRKRKRSRCSGGPGPAGMKGLPGSEAHKSEIAHRYNDLGEQHFKGLVLIAFSQYLQKCSYDEHAKLVQEVTDFAKTCVADESAANCDKSLHTLFGDKLCAIPNLRENYGELADCCTKQEPERNECFLQHKDDNPSLPPFERPEAEAMCTSFKENPTTFMGHYLHEVARRHPYFYAPELLYYAEQYNEILTQCCAEADKESCLTPKLDGVKEKALVSSVRQRMKCSSMQKFGERAFKAWAVARLSQTFPNADFAEITKLATDLTKVNKECCHGDLLECADDRAELAKYMCENQATISSKLQTCCDKPLLKKAHCLSEVEHDTMPADLPAIAADFVEDQEVCKNYAEAKDVFLGTFLYEYSRRHPDYSVSLLLRLAKKYEATLEKCCAEANPPACYGTVLAEFQPLVEEPKNLVKTNCDLYEKLGEYGFQNAILVRYTQKAPQVSTPTLVEAARNLGRVGTKCCTLPEDQRLPCVEDYLSAILNRVCLLHEKTPVSEHVTKCCSGSLVERRPCFSALTVDETYVPKEFKAETFTFHSDICTLPEKEKQIKKQTALAELVKHKPKATAEQLKTVMDDFAQFLDTCCKAADKDTCFSTEGPNLVTRCKDALASGGPGPAGMKGLPGSHGTVIESLESLNNYFNSSGIDVEEKSLFLDIWRNWQKDGDMKILQSQIISFYLRLFEVLKDNQAISNNISVIESHLITTFFSNSKAKKDAFMSIAKFEVNNPQVQRQAFNELIRVVHQLLPESSLRKRKRSRCSGGPGPAGMKGLPGSEAHKSEIAHRYNDLGEQHFKGLVLIAFSQYLQKCSYDEHAKLVQEVTDFAKTCVADESAANCDKSLHTLFGDKLCAIPNLRENYGELADCCTKQEPERNECFLQHKDDNPSLPPFERPEAEAMCTSFKENPTTFMGHYLHEVARRHPYFYAPELLYYAEQYNEILTQCCAEADKESCLTPKLDGVKEKALVSSVRQRMKCSSMQKFGERAFKAWAVARLSQTFPNADFAEITKLATDLTKVNKECCHGDLLECADDRAELAKYMCENQATISSKLQTCCDKPLLKKAHCLSEVEHDTMPADLPAIAADFVEDQEVCKNYAEAKDVFLGTFLYEYSRRHPDYSVSLLLRLAKKYEATLEKCCAEANPPACYGTVLAEFQPLVEEPKNLVKTNCDLYEKLGEYGFQNAILVRYTQKAPQVSTPTLVEAARNLGRVGTKCCTLPEDQRLPCVEDYLSAILNRVCLLHEKTPVSEHVTKCCSGSLVERRPCFSALTVDETYVPKEFKAETFTFHSDICTLPEKEKQIKKQTALAELVKHKPKATAEQLKTVMDDFAQFLDTCCKAADKDTCFSTEGPNLVTRCKDALAHHHHHHEPEA

SEQ ID NO: 106 - protein, 1511 aa, Artificial Sequence
  Description of Artificial Sequence: Synthetic polypeptide
MDMRVPAQLLGLLLLWLRGARCEAHKSEIAHRYNDLGEQHFKGLVLIAFSQYLQKCSYDEHAKLVQEVTDFAKTCVADESAANCDKSLHTLFGDKLCAIPNLRENYGELADCCTKQEPERNECFLQHKDDNPSLPPFERPEAEAMCTSFKENPTTFMGHYLHEVARRHPYFYAPELLYYAEQYNEILTQCCAEADKESCLTPKLDGVKEKALVSSVRQRMKCSSMQKFGERAFKAWAVARLSQTFPNADFAEITKLATDLTKVNKECCHGDLLECADDRAELAKYMCENQATISSKLQTCCDKPLLKKAHCLSEVEHDTMPADLPAIAADFVEDQEVCKNYAEAKDVFLGTFLYEYSRRHPDYSVSLLLRLAKKYEATLEKCCAEANPPACYGTVLAEFQPLVEEPKNLVKTNCDLYEKLGEYGFQNAILVRYTQKAPQVSTPTLVEAARNLGRVGTKCCTLPEDQRLPCVEDYLSAILNRVCLLHEKTPVSEHVTKCCSGSLVERRPCFSALTVDETYVPKEFKAETFTFHSDICTLPEKEKQIKKQTALAELVKHKPKATAEQLKTVMDDFAQFLDTCCKAADKDTCFSTEGPNLVTRCKDALASGGPGPAGMKGLPGSHGTVIESLESLNNYFNSSGIDVEEKSLFLDIWRNWQKDGDMKILQSQIISFYLRLFEVLKDNQAISNNISVIESHLITTFFSNSKAKKDAFMSIAKFEVNNPQVQRQAFNELIRVVHQLLPESSLRKRKRSRCSGGPGPAGMKGLPGSEAHKSEIAHRYNDLGEQHFKGLVLIAFSQYLQKCSYDEHAKLVQEVTDFAKTCVADESAANCDKSLHTLFGDKLCAIPNLRENYGELADCCTKQEPERNECFLQHKDDNPSLPPFERPEAEAMCTSFKENPTTFMGHYLHEVARRHPYFYAPELLYYAEQYNEILTQCCAEADKESCLTPKLDGVKEKALVSSVRQRMKCSSMQKFGERAFKAWAVARLSQTFPNADFAEITKLATDLTKVNKECCHGDLLECADDRAELAKYMCENQATISSKLQTCCDKPLLKKAHCLSEVEHDTMPADLPAIAADFVEDQEVCKNYAEAKDVFLGTFLYEYSRRHPDYSVSLLLRLAKKYEATLEKCCAEANPPACYGTVLAEFQPLVEEPKNLVKTNCDLYEKLGEYGFQNAILVRYTQKAPQVSTPTLVEAARNLGRVGTKCCTLPEDQRLPCVEDYLSAILNRVCLLHEKTPVSEHVTKCCSGSLVERRPCFSALTVDETYVPKEFKAETFTFHSDICTLPEKEKQIKKQTALAELVKHKPKATAEQLKTVMDDFAQFLDTCCKAADKDTCFSTEGPNLVTRCKDALASGGPGPAGMKGLPGSHGTVIESLESLNNYFNSSGIDVEEKSLFLDIWRNWQKDGDMKILQSQIISFYLRLFEVLKDNQAISNNISVIESHLITTFFSNSKAKKDAFMSIAKFEVNNPQVQRQAFNELIRVVHQLLPESSLRKRKRSRCHHHHHHEPEA

SEQ ID NO: 107 - protein, 2110 aa, Artificial Sequence
  Description of Artificial Sequence: Synthetic polypeptide
MDMRVPAQLLGLLLLWLRGARCEAHKSEIAHRYNDLGEQHFKGLVLIAFSQYLQKCSYDEHAKLVQEVTDFAKTCVADESAANCDKSLHTLFGDKLCAIPNLRENYGELADCCTKQEPERNECFLQHKDDNPSLPPFERPEAEAMCTSFKENPTTFMGHYLHEVARRHPYFYAPELLYYAEQYNEILTQCCAEADKESCLTPKLDGVKEKALVSSVRQRMKCSSMQKFGERAFKAWAVARLSQTFPNADFAEITKLATDLTKVNKECCHGDLLECADDRAELAKYMCENQATISSKLQTCCDKPLLKKAHCLSEVEHDTMPADLPAIAADFVEDQEVCKNYAEAKDVFLGTFLYEYSRRHPDYSVSLLLRLAKKYEATLEKCCAEANPPACYGTVLAEFQPLVEEPKNLVKTNCDLYEKLGEYGFQNAILVRYTQKAPQVSTPTLVEAARNLGRVGTKCCTLPEDQRLPCVEDYLSAILNRVCLLHEKTPVSEHVTKCCSGSLVERRPCFSALTVDETYVPKEFKAETFTFHSDICTLPEKEKQIKKQTALAELVKHKPKATAEQLKTVMDDFAQFLDTCCKAADKDTCFSTEGPNLVTRCKDALASGGPGPAGMKGLPGSHGTVIESLESLNNYFNSSGIDVEEKSLFLDIWRNWQKDGDMKILQSQIISFYLRLFEVLKDNQAISNNISVIESHLITTFFSNSKAKKDAFMSIAKFEVNNPQVQRQAFNELIRVVHQLLPESSLRKRKRSRCSGGPGPAGMKGLPGSEAHKSEIAHRYNDLGEQHFKGLVLIAFSQYLQKCSYDEHAKLVQEVTDFAKTCVADESAANCDKSLHTLFGDKLCAIPNLRENYGELADCCTKQEPERNECFLQHKDDNPSLPPFERPEAEAMCTSFKENPTTFMGHYLHEVARRHPYFYAPELLYYAEQYNEILTQCCAEADKESCLTPKLDGVKEKALVSSVRQRMKCSSMQKFGERAFKAWAVARLSQTFPNADFAEITKLATDLTKVNKECCHGDLLECADDRAELAKYMCENQATISSKLQTCCDKPLLKKAHCLSEVEHDTMPADLPAIAADFVEDQEVCKNYAEAKDVFLGTFLYEYSRRHPDYSVSLLLRLAKKYEATLEKCCAEANPPACYGTVLAEFQPLVEEPKNLVKTNCDLYEKLGEYGFQNAILVRYTQKAPQVSTPTLVEAARNLGRVGTKCCTLPEDQRLPCVEDYLSAILNRVCLLHEKTPVSEHVTKCCSGSLVERRPCFSALTVDETYVPKEFKAETFTFHSDICTLPEKEKQIKKQTALAELVKHKPKATAEQLKTVMDDFAQFLDTCCKAADKDTCFSTEGPNLVTRCKDALASGGPGPAGMKGLPGSHGTVIESLESLNNYFNSSGIDVEEKSLFLDIWRNWQKDGDMKILQSQIISFYLRLFEVLKDNQAISNNISVIESHLITTFFSNSKAKKDAFMSIAKFEVNNPQVQRQAFNELIRVVHQLLPESSLRKRKRSRCSGGPGPAGMKGLPGSEAHKSEIAHRYNDLGEQHFKGLVLIAFSQYLQKCSYDEHAKLVQEVTDFAKTCVADESAANCDKSLHTLFGDKLCAIPNLRENYGELADCCTKQEPERNECFLQHKDDNPSLPPFERPEAEAMCTSFKENPTTFMGHYLHEVARRHPYFYAPELLYYAEQYNEILTQCCAEADKESCLTPKLDGVKEKALVSSVRQRMKCSSMQKFGERAFKAWAVARLSQTFPNADFAEITKLATDLTKVNKECCHGDLLECADDRAELAKYMCENQATISSKLQTCCDKPLLKKAHCLSEVEHDTMPADLPAIAADFVEDQEVCKNYAEAKDVFLGTFLYEYSRRHPDYSVSLLLRLAKKYEATLEKCCAEANPPACYGTVLAEFQPLVEEPKNLVKTNCDLYEKLGEYGFQNAILVRYTQKAPQVSTPTLVEAARNLGRVGTKCCTLPEDQRLPCVEDYLSAILNRVCLLHEKTPVSEHVTKCCSGSLVERRPCFSALTVDETYVPKEFKAETFTFHSDICTLPEKEKQIKKQTALAELVKHKPKATAEQLKTVMDDFAQFLDTCCKAADKDTCFSTEGPNLVTRCKDALAHHHHHHEPEA

SEQ ID NO: 108 - protein, 2120 aa, Artificial Sequence
  Description of Artificial Sequence: Synthetic polypeptide
MDMRVPAQLLGLLLLWLRGARCEAHKSEIAHRYNDLGEQHFKGLVLIAFSQYLQKCSYDEHAKLVQEVTDFAKTCVADESAANCDKSLHTLFGDKLCAIPNLRENYGELADCCTKQEPERNECFLQHKDDNPSLPPFERPEAEAMCTSFKENPTTFMGHYLHEVARRHPYFYAPELLYYAEQYNEILTQCCAEADKESCLTPKLDGVKEKALVSSVRQRMKCSSMQKFGERAFKAWAVARLSQTFPNADFAEITKLATDLTKVNKECCHGDLLECADDRAELAKYMCENQATISSKLQTCCDKPLLKKAHCLSEVEHDTMPADLPAIAADFVEDQEVCKNYAEAKDVFLGTFLYEYSRRHPDYSVSLLLRLAKKYEATLEKCCAEANPPACYGTVLAEFQPLVEEPKNLVKTNCDLYEKLGEYGFQNAILVRYTQKAPQVSTPTLVEAARNLGRVGTKCCTLPEDQRLPCVEDYLSAILNRVCLLHEKTPVSEHVTKCCSGSLVERRPCFSALTVDETYVPKEFKAETFTFHSDICTLPEKEKQIKKQTALAELVKHKPKATAEQLKTVMDDFAQFLDTCCKAADKDTCFSTEGPNLVTRCKDALASGGPGPAGMKGLPGSHGTVIESLESLNNYFNSSGIDVEEKSLFLDIWRNWQKDGDMKILQSQIISFYLRLFEVLKDNQAISNNISVIESHLITTFFSNSKAKKDAFMSIAKFEVNNPQVQRQAFNELIRVVHQLLPESSLRKRKRSRCSGGPGPAGMKGLPGSGGGGSEAHKSEIAHRYNDLGEQHFKGLVLIAFSQYLQKCSYDEHAKLVQEVTDFAKTCVADESAANCDKSLHTLFGDKLCAIPNLRENYGELADCCTKQEPERNECFLQHKDDNPSLPPFERPEAEAMCTSFKENPTTFMGHYLHEVARRHPYFYAPELLYYAEQYNEILTQCCAEADKESCLTPKLDGVKEKALVSSVRQRMKCSSMQKFGERAFKAWAVARLSQTFPNADFAEITKLATDLTKVNKECCHGDLLECADDRAELAKYMCENQATISSKLQTCCDKPLLKKAHCLSEVEHDTMPADLPAIAADFVEDQEVCKNYAEAKDVFLGTFLYEYSRRHPDYSVSLLLRLAKKYEATLEKCCAEANPPACYGTVLAEFQPLVEEPKNLVKTNCDLYEKLGEYGFQNAILVRYTQKAPQVSTPTLVEAARNLGRVGTKCCTLPEDQRLPCVEDYLSAILNRVCLLHEKTPVSEHVTKCCSGSLVERRPCFSALTVDETYVPKEFKAETFTFHSDICTLPEKEKQIKKQTALAELVKHKPKATAEQLKTVMDDFAQFLDTCCKAADKDTCFSTEGPNLVTRCKDALAGGGGSSGGPGPAGMKGLPGSHGTVIESLESLNNYFNSSGIDVEEKSLFLDIWRNWQKDGDMKILQSQIISFYLRLFEVLKDNQAISNNISVIESHLITTFFSNSKAKKDAFMSIAKFEVNNPQVQRQAFNELIRVVHQLLPESSLRKRKRSRCSGGPGPAGMKGLPGSEAHKSEIAHRYNDLGEQHFKGLVLIAFSQYLQKCSYDEHAKLVQEVTDFAKTCVADESAANCDKSLHTLFGDKLCAIPNLRENYGELADCCTKQEPERNECFLQHKDDNPSLPPFERPEAEAMCTSFKENPTTFMGHYLHEVARRHPYFYAPELLYYAEQYNEILTQCCAEADKESCLTPKLDGVKEKALVSSVRQRMKCSSMQKFGERAFKAWAVARLSQTFPNADFAEITKLATDLTKVNKECCHGDLLECADDRAELAKYMCENQATISSKLQTCCDKPLLKKAHCLSEVEHDTMPADLPAIAADFVEDQEVCKNYAEAKDVFLGTFLYEYSRRHPDYSVSLLLRLAKKYEATLEKCCAEANPPACYGTVLAEFQPLVEEPKNLVKTNCDLYEKLGEYGFQNAILVRYTQKAPQVSTPTLVEAARNLGRVGTKCCTLPEDQRLPCVEDYLSAILNRVCLLHEKTPVSEHVTKCCSGSLVERRPCFSALTVDETYVPKEFKAETFTFHSDICTLPEKEKQIKKQTALAELVKHKPKATAEQLKTVMDDFAQFLDTCCKAADKDTCFSTEGPNLVTRCKDALAHHHHHHEPEA

SEQ ID NO: 109 - protein, 2130 aa, Artificial Sequence
  Description of Artificial Sequence: Synthetic polypeptide
MDMRVPAQLLGLLLLWLRGARCEAHKSEIAHRYNDLGEQHFKGLVLIAFSQYLQKCSYDEHAKLVQEVTDFAKTCVADESAANCDKSLHTLFGDKLCAIPNLRENYGELADCCTKQEPERNECFLQHKDDNPSLPPFERPEAEAMCTSFKENPTTFMGHYLHEVARRHPYFYAPELLYYAEQYNEILTQCCAEADKESCLTPKLDGVKEKALVSSVRQRMKCSSMQKFGERAFKAWAVARLSQTFPNADFAEITKLATDLTKVNKECCHGDLLECADDRAELAKYMCENQATISSKLQTCCDKPLLKKAHCLSEVEHDTMPADLPAIAADFVEDQEVCKNYAEAKDVFLGTFLYEYSRRHPDYSVSLLLRLAKKYEATLEKCCAEANPPACYGTVLAEFQPLVEEPKNLVKTNCDLYEKLGEYGFQNAILVRYTQKAPQVSTPTLVEAARNLGRVGTKCCTLPEDQRLPCVEDYLSAILNRVCLLHEKTPVSEHVTKCCSGSLVERRPCFSALTVDETYVPKEFKAETFTFHSDICTLPEKEKQIKKQTALAELVKHKPKATAEQLKTVMDDFAQFLDTCCKAADKDTCFSTEGPNLVTRCKDALASGGPGPAGMKGLPGSHGTVIESLESLNNYFNSSGIDVEEKSLFLDIWRNWQKDGDMKILQSQIISFYLRLFEVLKDNQAISNNISVIESHLITTFFSNSKAKKDAFMSIAKFEVNNPQVQRQAFNELIRVVHQLLPESSLRKRKRSRCSGGPGPAGMKGLPGSGGGGSGGGGSEAHKSEIAHRYNDLGEQHFKGLVLIAFSQYLQKCSYDEHAKLVQEVTDFAKTCVADESAANCDKSLHTLFGDKLCAIPNLRENYGELADCCTKQEPERNECFLQHKDDNPSLPPFERPEAEAMCTSFKENPTTFMGHYLHEVARRHPYFYAPELLYYAEQYNEILTQCCAEADKESCLTPKLDGVKEKALVSSVRQRMKCSSMQKFGERAFKAWAVARLSQTFPNADFAEITKLATDLTKVNKECCHGDLLECADDRAELAKYMCENQATISSKLQTCCDKPLLKKAHCLSEVEHDTMPADLPAIAADFVEDQEVCKNYAEAKDVFLGTFLYEYSRRHPDYSVSLLLRLAKKYEATLEKCCAEANPPACYGTVLAEFQPLVEEPKNLVKTNCDLYEKLGEYGFQNAILVRYTQKAPQVSTPTLVEAARNLGRVGTKCCTLPEDQRLPCVEDYLSAILNRVCLLHEKTPVSEHVTKCCSGSLVERRPCFSALTVDETYVPKEFKAETFTFHSDICTLPEKEKQIKKQTALAELVKHKPKATAEQLKTVMDDFAQFLDTCCKAADKDTCFSTEGPNLVTRCKDALAGGGGSGGGGSSGGPGPAGMKGLPGSHGTVIESLESLNNYFNSSGIDVEEKSLFLDIWRNWQKDGDMKILQSQIISFYLRLFEVLKDNQAISNNISVIESHLITTFFSNSKAKKDAFMSIAKFEVNNPQVQRQAFNELIRVVHQLLPESSLRKRKRSRCSGGPGPAGMKGLPGSEAHKSEIAHRYNDLGEQHFKGLVLIAFSQYLQKCSYDEHAKLVQEVTDFAKTCVADESAANCDKSLHTLFGDKLCAIPNLRENYGELADCCTKQEPERNECFLQHKDDNPSLPPFERPEAEAMCTSFKENPTTFMGHYLHEVARRHPYFYAPELLYYAEQYNEILTQCCAEADKESCLTPKLDGVKEKALVSSVRQRMKCSSMQKFGERAFKAWAVARLSQTFPNADFAEITKLATDLTKVNKECCHGDLLECADDRAELAKYMCENQATISSKLQTCCDKPLLKKAHCLSEVEHDTMPADLPAIAADFVEDQEVCKNYAEAKDVFLGTFLYEYSRRHPDYSVSLLLRLAKKYEATLEKCCAEANPPACYGTVLAEFQPLVEEPKNLVKTNCDLYEKLGEYGFQNAILVRYTQKAPQVSTPTLVEAARNLGRVGTKCCTLPEDQRLPCVEDYLSAILNRVCLLHEKTPVSEHVTKCCSGSLVERRPCFSALTVDETYVPKEFKAETFTFHSDICTLPEKEKQIKKQTALAELVKHKPKATAEQLKTVMDDFAQFLDTCCKAADKDTCFSTEGPNLVTRCKDALAHHHHHHEPEA

SEQ ID NO: 110 - protein, 703 aa, Artificial Sequence
  Description of Artificial Sequence: Synthetic polypeptide
MDMRVPAQLLGLLLLWLRGARCEVQLVESGGGLVQPGNSLRLSCAASGFTFSKFGMSWVRQAPGKGLEWVSSISGSGRDTLYAESVKGRFTISRDNAKTTLYLQMNSLRPEDTAVYYCTIGGSLSVSSQGTLVTVSSGGGGSGGGGSGGGGSHGTVIESLESLNNYFNSSGIDVEEKSLFLDIWRNWQKDGDMKILQSQIISFYLRLFEVLKDNQAISNNISVIESHLITTFFSNSKAKKDAFMSIAKFEVNNPQVQRQAFNELIRVVHQLLPESSLRKRKRSRCGGGGSGGGGSGGGGSEVQLVESGGGLVQPGNSLRLSCAASGFTFSKFGMSWVRQAPGKGLEWVSSISGSGRDTLYAESVKGRFTISRDNAKTTLYLQMNSLRPEDTAVYYCTIGGSLSVSSQGTLVTVSSGGGGSGGGGSGGGGSHGTVIESLESLNNYFNSSGIDVEEKSLFLDIWRNWQKDGDMKILQSQIISFYLRLFEVLKDNQAISNNISVIESHLITTFFSNSKAKKDAFMSIAKFEVNNPQVQRQAFNELIRVVHQLLPESSLRKRKRSRCGGGGSGGGGSGGGGSEVQLVESGGGLVQPGNSLRLSCAASGFTFSKFGMSWVRQAPGKGLEWVSSISGSGRDTLYAESVKGRFTISRDNAKTTLYLQMNSLRPEDTAVYYCTIGGSLSVSSQGTLVTVSSHHHHHHEPEA

SEQ ID NO: 111 - protein, 832 aa, Artificial Sequence
  Description of Artificial Sequence: Synthetic polypeptide
MDMRVPAQLLGLLLLWLRGARCEVQLVESGGGLVQPGNSLRLSCAASGFTFSKFGMSWVRQAPGKGLEWVSSISGSGRDTLYAESVKGRFTISRDNAKTTLYLQMNSLRPEDTAVYYCTIGGSLSVSSQGTLVTVSSSGGPGPAGMKGLPGSHGTVIESLESLNNYFNSSGIDVEEKSLFLDIWRNWQKDGDMKILQSQIISFYLRLFEVLKDNQAISNNISVIESHLITTFFSNSKAKKDAFMSIAKFEVNNPQVQRQAFNELIRVVHQLLPESSLRKRKRSRCSGGPGPAGMKGLPGSEVQLVESGGGLVQPGNSLRLSCAASGFTFSKFGMSWVRQAPGKGLEWVSSISGSGRDTLYAESVKGRFTISRDNAKTTLYLQMNSLRPEDTAVYYCTIGGSLSVSSQGTLVTVSSSGGPGPAGMKGLPGSHGTVIESLESLNNYFNSSGIDVEEKSLFLDIWRNWQKDGDMKILQSQIISFYLRLFEVLKDNQAISNNISVIESHLITTFFSNSKAKKDAFMSIAKFEVNNPQVQRQAFNELIRVVHQLLPESSLRKRKRSRCSGGPGPAGMKGLPGSEVQLVESGGGLVQPGNSLRLSCAASGFTFSKFGMSWVRQAPGKGLEWVSSISGSGRDTLYAESVKGRFTISRDNAKTTLYLQMNSLRPEDTAVYYCTIGGSLSVSSQGTLVTVSSGGGGSGGGGSGGGGSQVQLQESGGGLAQAGGSLSLSCAASGFTVSNSVMAWYRQTPGKQREFVAIINSVGSTNYADSVKGRFTISRDNAKNTVYLQMNNLKPEDTAVYVCNRNFDRIYWGQGTQVTVSSHHHHHHEPEA

SEQ ID NO: 112 - protein, 832 aa, Artificial Sequence
  Description of Artificial Sequence: Synthetic polypeptide
MDMRVPAQLLGLLLLWLRGARCQVQLQESGGGLAQAGGSLSLSCAASGFTVSNSVMAWYRQTPGKQREFVAIINSVGSTNYADSVKGRFTISRDNAKNTVYLQMNNLKPEDTAVYVCNRNFDRIYWGQGTQVTVSSGGGGSGGGGSGGGGSEVQLVESGGGLVQPGNSLRLSCAASGFTFSKFGMSWVRQAPGKGLEWVSSISGSGRDTLYAESVKGRFTISRDNAKTTLYLQMNSLRPEDTAVYYCTIGGSLSVSSQGTLVTVSSSGGPGPAGMKGLPGSHGTVIESLESLNNYFNSSGIDVEEKSLFLDIWRNWQKDGDMKILQSQIISFYLRLFEVLKDNQAISNNISVIESHLITTFFSNSKAKKDAFMSIAKFEVNNPQVQRQAFNELIRVVHQLLPESSLRKRKRSRCSGGPGPAGMKGLPGSEVQLVESGGGLVQPGNSLRLSCAASGFTFSKFGMSWVRQAPGKGLEWVSSISGSGRDTLYAESVKGRFTISRDNAKTTLYLQMNSLRPEDTAVYYCTIGGSLSVSSQGTLVTVSSSGGPGPAGMKGLPGSHGTVIESLESLNNYFNSSGIDVEEKSLFLDIWRNWQKDGDMKILQSQIISFYLRLFEVLKDNQAISNNISVIESHLITTFFSNSKAKKDAFMSIAKFEVNNPQVQRQAFNELIRVVHQLLPESSLRKRKRSRCSGGPGPAGMKGLPGSEVQLVESGGGLVQPGNSLRLSCAASGFTFSKFGMSWVRQAPGKGLEWVSSISGSGRDTLYAESVKGRFTISRDNAKTTLYLQMNSLRPEDTAVYYCTIGGSLSVSSQGTLVTVSSHHHHHHEPEA

SEQ ID NO: 113 - protein, 549 aa, Artificial Sequence
  Description of Artificial Sequence: Synthetic polypeptide
MDMRVPAQLLGLLLLWLRGARCRVIPVSGPARCLSQSRNLLKTTDDMVKTAREKLKHYSCTAEDIDHEDITRDQTSTLKTCLPLELHKNESCLATRETSSTTRGSCLPPQKTSLMMTLCLGSIYEDLKMYQTEFQAINAALQNHNHQQIILDKGMLVAIDELMQSLNHNGETLRQKPPVGEADPYRVKMKLCILLHAFSTRVVTINRVMGYLSSASGGPGPAGMKGLPGSMWELEKDVYVVEVDWTPDAPGETVNLTCDTPEEDDITWTSDQRHGVIGSGKTLTITVKEFLDAGQYTCHKGGETLSHSHLLLHKKENGIWSTEILKNFKNKTFLKCEAPNYSGRFTCSWLVQRNMDLKFNIKSSSSSPDSRAVTCGMASLSAEKVTLDQRDYEKYSVSCQEDVTCPTAEETLPIELALEARQQNKYENYSTSFFIRDIIKPDPPKNLQMKPLKNSQVEVSWEYPDSWSTPHSYFSLKFFVRIQRKKEKMKETEEGCNQKGAFLVEKTSTEVQCKGGNVCVQAQDRYYNSSCSKWACVPCRVRSHHHHHH

SEQ ID NO: 114 - protein, 579 aa, Artificial Sequence
  Description of Artificial Sequence: Synthetic polypeptide
MDMRVPAQLLGLLLLWLRGARCRVIPVSGPARCLSQSRNLLKTTDDMVKTAREKLKHYSCTAEDIDHEDITRDQTSTLKTCLPLELHKNESCLATRETSSTTRGSCLPPQKTSLMMTLCLGSIYEDLKMYQTEFQAINAALQNHNHQQIILDKGMLVAIDELMQSLNHNGETLRQKPPVGEADPYRVKMKLCILLHAFSTRVVTINRVMGYLSSAGGGGSGGGGSGGGGSSGGPGPAGMKGLPGSGGGGSGGGGSGGGGSMWELEKDVYVVEVDWTPDAPGETVNLTCDTPEEDDITWTSDQRHGVIGSGKTLTITVKEFLDAGQYTCHKGGETLSHSHLLLHKKENGIWSTEILKNFKNKTFLKCEAPNYSGRFTCSWLVQRNMDLKFNIKSSSSSPDSRAVTCGMASLSAEKVTLDQRDYEKYSVSCQEDVTCPTAEETLPIELALEARQQNKYENYSTSFFIRDIIKPDPPKNLQMKPLKNSQVEVSWEYPDSWSTPHSYFSLKFFVRIQRKKEKMKETEEGCNQKGAFLVEKTSTEVQCKGGNVCVQAQDRYYNSSCSKWACVPCRVRSHHHHHH

SEQ ID NO: 115 - protein, 809 aa, Artificial Sequence
  Description of Artificial Sequence: Synthetic polypeptide
MDMRVPAQLLGLLLLWLRGARCEVQLVESGGGLVQPGNSLRLSCAASGFTFSKFGMSWVRQAPGKGLEWVSSISGSGRDTLYAESVKGRFTISRDNAKTTLYLQMNSLRPEDTAVYYCTIGGSLSVSSQGTLVTVSSSGGPGPAGMKGLPGSMWELEKDVYVVEVDWTPDAPGETVNLTCDTPEEDDITWTSDQRHGVIGSGKTLTITVKEFLDAGQYTCHKGGETLSHSHLLLHKKENGIWSTEILKNFKNKTFLKCEAPNYSGRFTCSWLVQRNMDLKFNIKSSSSSPDSRAVTCGMASLSAEKVTLDQRDYEKYSVSCQEDVTCPTAEETLPIELALEARQQNKYENYSTSFFIRDIIKPDPPKNLQMKPLKNSQVEVSWEYPDSWSTPHSYFSLKFFVRIQRKKEKMKETEEGCNQKGAFLVEKTSTEVQCKGGNVCVQAQDRYYNSSCSKWACVPCRVRSGGGGSGGGGSGGGGSRVIPVSGPARCLSQSRNLLKTTDDMVKTAREKLKHYSCTAEDIDHEDITRDQTSTLKTCLPLELHKNESCLATRETSSTTRGSCLPPQKTSLMMTLCLGSIYEDLKMYQTEFQAINAALQNHNHQQIILDKGMLVAIDELMQSLNHNGETLRQKPPVGEADPYRVKMKLCILLHAFSTRVVTINRVMGYLSSASGGPGPAGMKGLPGSEVQLVESGGGLVQPGNSLRLSCAASGFTFSKFGMSWVRQAPGKGLEWVSSISGSGRDTLYAESVKGRFTISRDNAKTTLYLQMNSLRPEDTAVYYCTIGGSLSVSSQGTLVTVSSHHHHHH

SEQ ID NO: 116 - protein, 938 aa, Artificial Sequence
  Description of Artificial Sequence: Synthetic polypeptide
MDMRVPAQLLGLLLLWLRGARCQVQLQESGGGLVQAGGSLRLSCAASGRIFSIDIMSWYRQAPGKQRELVARITRGGTISYDDSVKGRFTISRDNAKNTVYLQMNSLKPEDTGVYYCNALYGTDYWGKGTQVTVSSGGGGSGGGGSGGGGSEVQLVESGGGLVQPGNSLRLSCAASGFTFSKFGMSWVRQAPGKGLEWVSSISGSGRDTLYAESVKGRFTISRDNAKTTLYLQMNSLRPEDTAVYYCTIGGSLSVSSQGTLVTVSSSGGPGPAGMKGLPGSMWELEKDVYVVEVDWTPDAPGETVNLTCDTPEEDDITWTSDQRHGVIGSGKTLTITVKEFLDAGQYTCHKGGETLSHSHLLLHKKENGIWSTEILKNFKNKTFLKCEAPNYSGRFTCSWLVQRNMDLKFNIKSSSSSPDSRAVTCGMASLSAEKVTLDQRDYEKYSVSCQEDVTCPTAEETLPIELALEARQQNKYENYSTSFFIRDIIKPDPPKNLQMKPLKNSQVEVSWEYPDSWSTPHSYFSLKFFVRIQRKKEKMKETEEGCNQKGAFLVEKTSTEVQCKGGNVCVQAQDRYYNSSCSKWACVPCRVRSGGGGSGGGGSGGGGSRVIPVSGPARCLSQSRNLLKTTDDMVKTAREKLKHYSCTAEDIDHEDITRDQTSTLKTCLPLELHKNESCLATRETSSTTRGSCLPPQKTSLMMTLCLGSIYEDLKMYQTEFQAINAALQNHNHQQIILDKGMLVAIDELMQSLNHNGETLRQKPPVGEADPYRVKMKLCILLHAFSTRVVTINRVMGYLSSASGGPGPAGMKGLPGSEVQLVESGGGLVQPGNSLRLSCAASGFTFSKFGMSWVRQAPGKGLEWVSSISGSGRDTLYAESVKGRFTISRDNAKTTLYLQMNSLRPEDTAVYYCTIGGSLSVSSQGTLVTVSSHHHHHH

SEQ ID NO: 117 - protein, 938 aa, Artificial Sequence; identical to SEQ ID NO: 116
  Description of Artificial Sequence: Synthetic polypeptide

SEQ ID NO: 118 - protein, 938 aa, Artificial Sequence
  Description of Artificial Sequence: Synthetic polypeptide
MDMRVPAQLLGLLLLWLRGARCEVQLVESGGGLVQPGNSLRLSCAASGFTFSKFGMSWVRQAPGKGLEWVSSISGSGRDTLYAESVKGRFTISRDNAKTTLYLQMNSLRPEDTAVYYCTIGGSLSVSSQGTLVTVSSSGGPGPAGMKGLPGSMWELEKDVYVVEVDWTPDAPGETVNLTCDTPEEDDITWTSDQRHGVIGSGKTLTITVKEFLDAGQYTCHKGGETLSHSHLLLHKKENGIWSTEILKNFKNKTFLKCEAPNYSGRFTCSWLVQRNMDLKFNIKSSSSSPDSRAVTCGMASLSAEKVTLDQRDYEKYSVSCQEDVTCPTAEETLPIELALEARQQNKYENYSTSFFIRDIIKPDPPKNLQMKPLKNSQVEVSWEYPDSWSTPHSYFSLKFFVRIQRKKEKMKETEEGCNQKGAFLVEKTSTEVQCKGGNVCVQAQDRYYNSSCSKWACVPCRVRSGGGGSGGGGSGGGGSRVIPVSGPARCLSQSRNLLKTTDDMVKTAREKLKHYSCTAEDIDHEDITRDQTSTLKTCLPLELHKNESCLATRETSSTTRGSCLPPQKTSLMMTLCLGSIYEDLKMYQTEFQAINAALQNHNHQQIILDKGMLVAIDELMQSLNHNGETLRQKPPVGEADPYRVKMKLCILLHAFSTRVVTINRVMGYLSSASGGPGPAGMKGLPGSEVQLVESGGGLVQPGNSLRLSCAASGFTFSKFGMSWVRQAPGKGLEWVSSISGSGRDTLYAESVKGRFTISRDNAKTTLYLQMNSLRPEDTAVYYCTIGGSLSVSSQGTLVTVSSGGGGSGGGGSGGGGSQVQLQESGGGLVQAGGSLRLSCAASGRIFSIDIMSWYRQAPGKQRELVARITRGGTISYDDSVKGRFTISRDNAKNTVYLQMNSLKPEDTGVYYCNALYGTDYWGKGTQVTVSSHHHHHH

SEQ ID NO: 119 - protein, 962 aa, Artificial Sequence
  Description of Artificial Sequence: Synthetic polypeptide
MDMRVPAQLLGLLLLWLRGARCIWELKKDVYVVELDWYPDAPGEMVVLTCDTPEEDGITWTLDQSSEVLGSGKTLTIQVKEFGDAGQYTCHKGGEVLSHSLLLLHKKEDGIWSTDILKDQKEPKNKTFLRCEAKNYSGRFTCWWLTTISTDLTFSVKSSRGSSDPQGVTCGAATLSAERVRGDNKEYEYSVECQEDSACPAAEESLPIEVMVDAVHKLKYENYTSSFFIRDIIKPDPPKNLQLKPLKNSRQVEVSWEYPDTWSTPHSYFSLTFCVQVQGKSKREKKDRVFTDKTSATVICRKNASISVRAQDRYYSSSWSEWASVPCSGGGGSGGGGSGGGGSRVIPVSGPARCLSQSRNLLKTTDDMVKTAREKLKHYSCTAEDIDHEDITRDQTSTLKTCLPLELHKNESCLATRETSSTTRGSCLPPQKTSLMMTLCLGSIYEDLKMYQTEFQAINAALQNHNHQQIILDKGMLVAIDELMQSLNHNGETLRQKPPVGEADPYRVKMKLCILLHAFSTRVVTINRVMGYLSSAGGGGSGGGGSGGGGSGGGGSGGGGSGGGGSGGGGSGGGGSGGGGSQSVLTQPPSVSGAPGQRVTISCSGSRSNIGSNTVKWYQQLPGTAPKLLIYYNDQRPSGVPDRFSGSKSGTSASLAITGLQAEDEADYYCQSYDRYTHPALLFGTGTKVTVLGGGGSGGGGSGGGGSQVQLVESGGGVVQPGRSLRLSCAASGFTFSSYGMHWVRQAPGKGLEWVAFIRYDGSNKYYADSVKGRFTISRDNSKNTLYLQMNSLRAEDTAVYYCKTHGSHDNWGQGTMVTVSSGGGGSGGGGSGGGGSEVQLVESGGGLVQPGNSLRLSCAASGFTFSKFGMSWVRQAPGKGLEWVSSISGSGRDTLYAESVKGRFTISRDNAKTTLYLQMNSLRPEDTAVYYCTIGGSLSVSSQGTLVTVSSHHHHHHEPEA

SEQ ID NO: 120 - protein, 832 aa, Artificial Sequence
  Description of Artificial Sequence: Synthetic polypeptide
MDMRVPAQLLGLLLLWLRGARCIWELKKDVYVVELDWYPDAPGEMVVLTCDTPEEDGITWTLDQSSEVLGSGKTLTIQVKEFGDAGQYTCHKGGEVLSHSLLLLHKKEDGIWSTDILKDQKEPKNKTFLRCEAKNYSGRFTCWWLTTISTDLTFSVKSSRGSSDPQGVTCGAATLSAERVRGDNKEYEYSVECQEDSACPAAEESLPIEVMVDAVHKLKYENYTSSFFIRDIIKPDPPKNLQLKPLKNSRQVEVSWEYPDTWSTPHSYFSLTFCVQVQGKSKREKKDRVFTDKTSATVICRKNASISVRAQDRYYSSSWSEWASVPCSGGGGSGGGGSGGGGSRVIPVSGPARCLSQSRNLLKTTDDMVKTAREKLKHYSCTAEDIDHEDITRDQTSTLKTCLPLELHKNESCLATRETSSTTRGSCLPPQKTSLMMTLCLGSIYEDLKMYQTEFQAINAALQNHNHQQIILDKGMLVAIDELMQSLNHNGETLRQKPPVGEADPYRVKMKLCILLHAFSTRVVTINRVMGYLSSASGGPGPAGMKGLPGSGGGGSGGGGSGGGGSGGGGSGGGGSGGGGSQSVLTQPPSVSGAPGQRVTISCSGSRSNIGSNTVKWYQQLPGTAPKLLIYYNDQRPSGVPDRFSGSKSGTSASLAITGLQAEDEADYYCQSYDRYTHPALLFGTGTKVTVLGGGGSGGGGSGGGGSQVQLVESGGGVVQPGRSLRLSCAASGFTFSSYGMHWVRQAPGKGLEWVAFIRYDGSNKYYADSVKGRFTISRDNSKNTLYLQMNSLRAEDTAVYYCKTHGSHDNWGQGTMVTVSSHHHHHHEPEA

SEQ ID NO: 121 - protein, 1091 aa, Artificial Sequence
  Description of Artificial Sequence: Synthetic polypeptide
MDMRVPAQLLGLLLLWLRGARCIWELKKDVYVVELDWYPDAPGEMVVLTCDTPEEDGITWTLDQSSEVLGSGKTLTIQVKEFGDAGQYTCHKGGEVLSHSLLLLHKKEDGIWSTDILKDQKEPKNKTFLRCEAKNYSGRFTCWWLTTISTDLTFSVKSSRGSSDPQGVTCGAATLSAERVRGDNKEYEYSVECQEDSACPAAEESLPIEVMVDAVHKLKYENYTSSFFIRDIIKPDPPKNLQLKPLKNSRQVEVSWEYPDTWSTPHSYFSLTFCVQVQGKSKREKKDRVFTDKTSATVICRKNASISVRAQDRYYSSSWSEWASVPCSGGGGSGGGGSGGGGSRVIPVSGPARCLSQSRNLLKTTDDMVKTAREKLKHYSCTAEDIDHEDITRDQTSTLKTCLPLELHKNESCLATRETSSTTRGSCLPPQKTSLMMTLCLGSIYEDLKMYQTEFQAINAALQNHNHQQIILDKGMLVAIDELMQSLNHNGETLRQKPPVGEADPYRVKMKLCILLHAFSTRVVTINRVMGYLSSASGGPGPAGMKGLPGSGGGGSGGGGSGGGGSGGGGSGGGGSGGGGSQSVLTQPPSVSGAPGQRVTISCSGSRSNIGSNTVKWYQQLPGTAPKLLIYYNDQRPSGVPDRFSGSKSGTSASLAITGLQAEDEADYYCQSYDRYTHPALLFGTGTKVTVLGGGGSGGGGSGGGGSQVQLVESGGGVVQPGRSLRLSCAASGFTFSSYGMHWVRQAPGKGLEWVAFIRYDGSNKYYADSVKGRFTISRDNSKNTLYLQMNSLRAEDTAVYYCKTHGSHDNWGQGTMVTVSSGGGGSGGGGSGGGGSEVQLVESGGGLVQPGNSLRLSCAASGFTFSKFGMSWVRQAPGKGLEWVSSISGSGRDTLYAESVKGRFTISRDNAKTTLYLQMNSLRPEDTAVYYCTIGGSLSVSSQGTLVTVSSGGGGSGGGGSGGGGSQVQLQESGGGLAQAGGSLSLSCAASGFTVSNSVMAWYRQTPGKQREFVAIINSVGSTNYADSVKGRFTISRDNAKNTVYLQMNNLKPEDTAVYVCNRNFDRIYWGQGTQVTVSSHHHHHHEPEA

SEQ ID NO: 122 - protein, 1091 aa, Artificial Sequence
  Description of Artificial Sequence: Synthetic polypeptide
MDMRVPAQLLGLLLLWLRGARCQVQLQESGGGLAQAGGSLSLSCAASGFTVSNSVMAWYRQTPGKQREFVAIINSVGSTNYADSVKGRFTISRDNAKNTVYLQMNNLKPEDTAVYVCNRNFDRIYWGQGTQVTVSSGGGGSGGGGSGGGGSIWELKKDVYVVELDWYPDAPGEMVVLTCDTPEEDGITWTLDQSSEVLGSGKTLTIQVKEFGDAGQYTCHKGGEVLSHSLLLLHKKEDGIWSTDILKDQKEPKNKTFLRCEAKNYSGRFTCWWLTTISTDLTFSVKSSRGSSDPQGVTCGAATLSAERVRGDNKEYEYSVECQEDSACPAAEESLPIEVMVDAVHKLKYENYTSSFFIRDIIKPDPPKNLQLKPLKNSRQVEVSWEYPDTWSTPHSYFSLTFCVQVQGKSKREKKDRVFTDKTSATVICRKNASISVRAQDRYYSSSWSEWASVPCSGGGGSGGGGSGGGGSRVIPVSGPARCLSQSRNLLKTTDDMVKTAREKLKHYSCTAEDIDHEDITRDQTSTLKTCLPLELHKNESCLATRETSSTTRGSCLPPQKTSLMMTLCLGSIYEDLKMYQTEFQAINAALQNHNHQQIILDKGMLVAIDELMQSLNHNGETLRQKPPVGEADPYRVKMKLCILLHAFSTRVVTINRVMGYLSSASGGPGPAGMKGLPGSGGGGSGGGGSGGGGSGGGGSGGGGSGGGGSQSVLTQPPSVSGAPGQRVTISCSGSRSNIGSNTVKWYQQLPGTAPKLLIYYNDQRPSGVPDRFSGSKSGTSASLAITGLQAEDEADYYCQSYDRYTHPALLFGTGTKVTVLGGGGSGGGGSGGGGSQVQLVESGGGVVQPGRSLRLSCAASGFTFSSYGMHWVRQAPGKGLEWVAFIRYDGSNKYYADSVKGRFTISRDNSKNTLYLQMNSLRAEDTAVYYCKTHGSHDNWGQGTMVTVSSGGGGSGGGGSGGGGSEVQLVESGGGLVQPGNSLRLSCAASGFTFSKFGMSWVRQAPGKGLEWVSSISGSGRDTLYAESVKGRFTISRDNAKTTLYLQMNSLRPEDTAVYYCTIGGSLSVSSQGTLVTVSSHHHHHHEPEA

SEQ ID NO: 123 - protein, 1091 aa, Artificial Sequence
  Description of Artificial Sequence: Synthetic polypeptide
MDMRVPAQLLGLLLLWLRGARCQVQLQESGGGLAQAGGSLSLSCAASGFTVSNSVMAWYRQTPGKQREFVAIINSVGSTNYADSVKGRFTISRDNAKNTVYLQMNNLKPEDTAVYVCNRNFDRIYWGQGTQVTVSSSGGPGPAGMKGLPGSIWELKKDVYVVELDWYPDAPGEMVVLTCDTPEEDGITWTLDQSSEVLGSGKTLTIQVKEFGDAGQYTCHKGGEVLSHSLLLLHKKEDGIWSTDILKDQKEPKNKTFLRCEAKNYSGRFTCWWLTTISTDLTFSVKSSRGSSDPQGVTCGAATLSAERVRGDNKEYEYSVECQEDSACPAAEESLPIEVMVDAVHKLKYENYTSSFFIRDIIKPDPPKNLQLKPLKNSRQVEVSWEYPDTWSTPHSYFSLTFCVQVQGKSKREKKDRVFTDKTSATVICRKNASISVRAQDRYYSSSWSEWASVPCSGGGGSGGGGSGGGGSRVIPVSGPARCLSQSRNLLKTTDDMVKTAREKLKHYSCTAEDIDHEDITRDQTSTLKTCLPLELHKNESCLATRETSSTTRGSCLPPQKTSLMMTLCLGSIYEDLKMYQTEFQAINAALQNHNHQQIILDKGMLVAIDELMQSLNHNGETLRQKPPVGEADPYRVKMKLCILLHAFSTRVVTINRVMGYLSSASGGPGPAGMKGLPGSGGGGSGGGGSGGGGSGGGGSGGGGSGGGGSQSVLTQPPSVSGAPGQRVTISCSGSRSNIGSNTVKWYQQLPGTAPKLLIYYNDQRPSGVPDRFSGSKSGTSASLAITGLQAEDEADYYCQSYDRYTHPALLFGTGTKVTVLGGGGSGGGGSGGGGSQVQLVESGGGVVQPGRSLRLSCAASGFTFSSYGMHWVRQAPGKGLEWVAFIRYDGSNKYYADSVKGRFTISRDNSKNTLYLQMNSLRAEDTAVYYCKTHGSHDNWGQGTMVTVSSGGGGSGGGGSGGGGSEVQLVESGGGLVQPGNSLRLSCAASGFTFSKFGMSWVRQAPGKGLEWVSSISGSGRDTLYAESVKGRFTISRDNAKTTLYLQMNSLRPEDTAVYYCTIGGSLSVSSQGTLVTVSSHHHHHHEPEA

SEQ ID NO: 124 - protein, 674 aa, Artificial Sequence
  Description of Artificial Sequence: Synthetic polypeptide
MDMRVPAQLLGLLLLWLRGARCAPTSSSTKKTQLQLEHLLLDLQMILNGINNYKNPKLTRMLTFKFYMPKKATELKHLQCLEEELKPLEEVLNLAQSKNFHLRPRDLISNINVIVLELKGSETTFMCEYADETATIVEFLNRWITFCQSIISTLTSGGPGPAGMKGLPGSEVQLVESGGGLVQPGGSLRLSCAASGFTFSSYTLAWVRQAPGKGLEWVAAIDSSSYTYSPDTVRGRFTISRDNAKNSLYLQMNSLRAEDTAVYYCARDSNWDALDYWGQGTTVTVSSGGGGSGGGGSGGGGSDIQMTQSPSSLSASVGDRVTITCKASQNVGTNVGWYQQKPGKAPKALIYSASFRYSGVPSRFSGSGSGTDFTLTISSLQPEDFATYYCQQYYTYPYTFGGGTKVEIKGGGGSGGGGSGGGGSEVQLVESGGGLVQPGNSLRLSCAASGFTFSKFGMSWVRQAPGKGLEWVSSISGSGRDTLYAESVKGRFTISRDNAKTTLYLQMNSLRPEDTAVYYCTIGGSLSVSSQGTLVTVSSGGGGSGGGGSGGGGSQVQLQESGGGLVQAGGSLRLSCAASGRIFSIDIMSWYRQAPGKQRELVARITRGGTISYDDSVKGRFTISRDNAKNTVYLQMNSLKPEDTGVYYCNALYGTDYWGKGTQVTVSSHHHHHH

SEQ ID NO: 125 - protein, 674 aa, Artificial Sequence
  Description of Artificial Sequence: Synthetic polypeptide
MDMRVPAQLLGLLLLWLRGARCQVQLQESGGGLVQAGGSLRLSCAASGRIFSIDIMSWYRQAPGKQRELVARITRGGTISYDDSVKGRFTISRDNAKNTVYLQMNSLKPEDTGVYYCNALYGTDYWGKGTQVTVSSSGGPGPAGMKGLPGSEVQLVESGGGLVQPGNSLRLSCAASGFTFSKFGMSWVRQAPGKGLEWVSSISGSGRDTLYAESVKGRFTISRDNAKTTLYLQMNSLRPEDTAVYYCTIGGSLSVSSQGTLVTVSSSGGPGPAGMKGLPGSEVQLVESGGGLVQPGGSLRLSCAASGFTFSSYTLAWVRQAPGKGLEWVAAIDSSSYTYSPDTVRGRFTISRDNAKNSLYLQMNSLRAEDTAVYYCARDSNWDALDYWGQGTTVTVSSGGGGSGGGGSGGGGSDIQMTQSPSSLSASVGDRVTITCKASQNVGTNVGWYQQKPGKAPKALIYSASFRYSGVPSRFSGSGSGTDFTLTISSLQPEDFATYYCQQYYTYPYTFGGGTKVEIKSGGPGPAGMKGLPGSAPTSSSTKKTQLQLEHLLLDLQMILNGINNYKNPKLTRMLTFKFYMPKKATELKHLQCLEEELKPLEEVLNLAQSKNFHLRPRDLISNINVIVLELKGSETTFMCEYADETATIVEFLNRWITFCQSIISTLTHHHHHH

SEQ ID NO: 126 - protein, 425 aa, Artificial Sequence
  Description of Artificial Sequence: Synthetic polypeptide
MDMRVPAQLLGLLLLWLRGARCELCDDDPPEIPHATFKAMAYKEGTMLNCECKRGFRRIKSGSLYMLCTGNSSHSSWDNQCQCTSSATRNTTKQVTPQPEEQKERKTTEMQSPMQPVDQASLPGHCREPPPWENEATERIYHFVVGQMVYYQCVQGYRALHRGPAESVCKMTHGKTRWTQPQLICTGEMETSQFPGEEKPQASPEGRPESETSCLVTTTDFQIQTEMAATMETSIFTTEYQGGGGSGGGGSGGGGSGGGGSGGGGSGGGGSSGGPGPAGMKGLPGSAPTSSSTKKTQLQLEHLLLDLQMILNGINNYKNPKLTRMLTFKFYMPKKATELKHLQCLEEELKPLEEVLNLAQSKNFHLRPRDLISNINVIVLELKGSETTFMCEYADETATIVEFLNRWITFCQSIISTLTHHHHHH

SEQ ID NO: 127 - protein, 425 aa, Artificial Sequence
  Description of Artificial Sequence: Synthetic polypeptide
MDMRVPAQLLGLLLLWLRGARCAPTSSSTKKTQLQLEHLLLDLQMILNGINNYKNPKLTRMLTFKFYMPKKATELKHLQCLEEELKPLEEVLNLAQSKNFHLRPRDLISNINVIVLELKGSETTFMCEYADETATIVEFLNRWITFCQSIISTLTSGGPGPAGMKGLPGSGGGGSGGGGSGGGGSGGGGSGGGGSGGGGSELCDDDPPEIPHATFKAMAYKEGTMLNCECKRGFRRIKSGSLYMLCTGNSSHSSWDNQCQCTSSATRNTTKQVTPQPEEQKERKTTEMQSPMQPVDQASLPGHCREPPPWENEATERIYHFVVGQMVYYQCVQGYRALHRGPAESVCKMTHGKTRWTQPQLICTGEMETSQFPGEEKPQASPEGRPESETSCLVTTTDFQIQTEMAATMETSIFTTEYQHHHHHH

SEQ ID NO: 128 - protein, 555 aa, Artificial Sequence
  Description of Artificial Sequence: Synthetic polypeptide
MDMRVPAQLLGLLLLWLRGARCEVQLVESGGGLVQPGNSLRLSCAASGFTFSKFGMSWVRQAPGKGLEWVSSISGSGRDTLYAESVKGRFTISRDNAKTTLYLQMNSLRPEDTAVYYCTIGGSLSVSSQGTLVTVSSGGGGSGGGGSGGGGSELCDDDPPEIPHATFKAMAYKEGTMLNCECKRGFRRIKSGSLYMLCTGNSSHSSWDNQCQCTSSATRNTTKQVTPQPEEQKERKTTEMQSPMQPVDQASLPGHCREPPPWENEATERIYHFVVGQMVYYQCVQGYRALHRGPAESVCKMTHGKTRWTQPQLICTGEMETSQFPGEEKPQASPEGRPESETSCLVTTTDFQIQTEMAATMETSIFTTEYQGGGGSGGGGSGGGGSGGGGSGGGGSGGGGSSGGPGPAGMKGLPGSAPTSSSTKKTQLQLEHLLLDLQMILNGINNYKNPKLTRMLTFKFYMPKKATELKHLQCLEEELKPLEEVLNLAQSKNFHLRPRDLISNINVIVLELKGSETTFMCEYADETATIVEFLNRWITFCQSIISTLTHHHHHH

SEQ ID NO: 129 - protein, 555 aa, Artificial Sequence
  Description of Artificial Sequence: Synthetic polypeptide
MDMRVPAQLLGLLLLWLRGARCAPTSSSTKKTQLQLEHLLLDLQMILNGINNYKNPKLTRMLTFKFYMPKKATELKHLQCLEEELKPLEEVLNLAQSKNFHLRPRDLISNINVIVLELKGSETTFMCEYADETATIVEFLNRWITFCQSIISTLTSGGPGPAGMKGLPGSGGGGSGGGGSGGGGSGGGGSGGGGSGGGGSELCDDDPPEIPHATFKAMAYKEGTMLNCECKRGFRRIKSGSLYMLCTGNSSHSSWDNQCQCTSSATRNTTKQVTPQPEEQKERKTTEMQSPMQPVDQASLPGHCREPPPWENEATERIYHFVVGQMVYYQCVQGYRALHRGPAESVCKMTHGKTRWTQPQLICTGEMETSQFPGEEKPQASPEGRPESETSCLVTTTDFQIQTEMAATMETSIFTTEYQGGGGSGGGGSGGGGSEVQLVESGGGLVQPGNSLRLSCAASGFTFSKFGMSWVRQAPGKGLEWVSSISGSGRDTLYAESVKGRFTISRDNAKTTLYLQMNSLRPEDTAVYYCTIGGSLSVSSQGTLVTVSSHHHHHH

SEQ ID NO: 130 - protein, 555 aa, Artificial Sequence
  Description of Artificial Sequence: Synthetic polypeptide
MDMRVPAQLLGLLLLWLRGARCAPTSSSTKKTQLQLEHLLLDLQMILNGINNYKNPKLTRMLTFKFYMPKKATELKHLQCLEEELKPLEEVLNLAQSKNFHLRPRDLISNINVIVLELKGSETTFMCEYADETATIVEFLNRWITFCQSIISTLTSGGPGPAGMKGLPGSGGGGSGGGGSGGGGSGGGGSGGGGSGGGGSELCDDDPPEIPHATFKAMAYKEGTMLNCECKRGFRRIKSGSLYMLCTGNSSHSSWDNQCQCTSSATRNTTKQVTPQPEEQKERKTTEMQSPMQPVDQASLPGHCREPPPWENEATERIYHFVVGQMVYYQCVQGYRALHRGPAESVCKMTHGKTRWTQPQLICTGEMETSQFPGEEKPQASPEGRPESETSCLVTTTDFQIQTEMAATMETSIFTTEYQSGGPGPAGMKGLPGSEVQLVESGGGLVQPGNSLRLSCAASGFTFSKFGMSWVRQAPGKGLEWVSSISGSGRDTLYAESVKGRFTISRDNAKTTLYLQMNSLRPEDTAVYYCTIGGSLSVSSQGTLVTVSSHHHHHH

SEQ ID NO: 131 - protein, 575 aa, Artificial Sequence
  Description of Artificial Sequence: Synthetic polypeptide
MDMRVPAQLLGLLLLWLRGARCEVQLVESGGGLVQPGNSLRLSCAASGFTFSKFGMSWVRQAPGKGLEWVSSISGSGRDTLYAESVKGRFTISRDNAKTTLYLQMNSLRPEDTAVYYCTIGGSLSVSSQGTLVTVSSSGGPGPAGMKGLPGSEVQLVESGGGLVQPGGSLRLSCAASGFTFSSYTLAWVRQAPGKGLEWVAAIDSSSYTYSPDTVRGRFTISRDNAKNSLYLQMNSLRAEDTAVYYCARDSNWDALDYWGQGTTVTVSSGGGGSGGGGSGGGGSDIQMTQSPSSLSASVGDRVTITCKASQNVGTNVGWYQQKPGKAPKALIYSASFRYSGVPSRFSGSGSGTDFTLTISSLQPEDFATYYCQQYYTYPYTFGGGTKVEIKGGGGSGGGGSGGGGSGGGGSGGGGSGGGGSSGGPGPAGMKGLPGSAPTSSSTKKTQLQLEHLLLDLQMILNGINNYKNPKLTRMLTFKFYMPKKATELKHLQCLEEELKPLEEVLNLAQSKNFHLRPRDLISNINVIVLELKGSETTFMCEYADETATIVEFLNRWITFCQSIISTLTHHHHHH

SEQ ID NO: 132 - protein, 704 aa, Artificial Sequence
  Description of Artificial Sequence: Synthetic polypeptide
MDMRVPAQLLGLLLLWLRGARCAPTSSSTKKTQLQLEHLLLDLQMILNGINNYKNPKLTRMLTFKFYMPKKATELKHLQCLEEELKPLEEVLNLAQSKNFHLRPRDLISNINVIVLELKGSETTFMCEYADETATIVEFLNRWITFCQSIISTLTSGGPGPAGMKGLPGSGGGGSGGGGSGGGGSGGGGSGGGGSGGGGSEVQLVESGGGLVQPGGSLRLSCAASGFTFSSYTLAWVRQAPGKGLEWVAAIDSSSYTYSPDTVRGRFTISRDNAKNSLYLQMNSLRAEDTAVYYCARDSNWDALDYWGQGTTVTVSSSGGPGPAGMKGLPGSDIQMTQSPSSLSASVGDRVTITCKASQNVGTNVGWYQQKPGKAPKALIYSASFRYSGVPSRFSGSGSGTDFTLTISSLQPEDFATYYCQQYYTYPYTFGGGTKVEIKGGGGSGGGGSGGGGSEVQLVESGGGLVQPGNSLRLSCAASGFTFSKFGMSWVRQAPGKGLEWVSSISGSGRDTLYAESVKGRFTISRDNAKTTLYLQMNSLRPEDTAVYYCTIGGSLSVSSQGTLVTVSSGGGGSGGGGSGGGGSQVQLQESGGGLVQAGGSLRLSCAASGRIFSIDIMSWYRQAPGKQRELVARITRGGTISYDDSVKGRFTISRDNAKNTVYLQMNSLKPEDTGVYYCNALYGTDYWGKGTQVTVSSHHHHHH

SEQ ID NO: 133 - protein, 689 aa, Artificial Sequence
  Description of Artificial Sequence: Synthetic polypeptide
MDMRVPAQLLGLLLLWLRGARCQVQLQESGGGLVQAGGSLRLSCAASGRIFSIDIMSWYRQAPGKQRELVARITRGGTISYDDSVKGRFTISRDNAKNTVYLQMNSLKPEDTGVYYCNALYGTDYWGKGTQVTVSSGGGGSGGGGSGGGGSAPTSSSTKKTQLQLEHLLLDLQMILNGINNYKNPKLTRMLTFKFYMPKKATELKHLQCLEEELKPLEEVLNLAQSKNFHLRPRDLISNINVIVLELKGSETTFMCEYADETATIVEFLNRWITFCQSIISTLTSGGPGPAGMKGLPGSEVQLVESGGGLVQPGNSLRLSCAASGFTFSKFGMSWVRQAPGKGLEWVSSISGSGRDTLYAESVKGRFTISRDNAKTTLYLQMNSLRPEDTAVYYCTIGGSLSVSSQGTLVTVSSGGGGSGGGGSGGGGSGGGGSGGGGSGGGGSEVQLVESGGGLVQPGGSLRLSCAASGFTFSSYTLAWVRQAPGKGLEWVAAIDSSSYTYSPDTVRGRFTISRDNAKNSLYLQMNSLRAEDTAVYYCARDSNWDALDYWGQGTTVTVSSGGGGSGGGGSGGGGSDIQMTQSPSSLSASVGDRVTITCKASQNVGTNVGWYQQKPGKAPKALIYSASFRYSGVPSRFSGSGSGTDFTLTISSLQPEDFATYYCQQYYTYPYTFGGGTKVEIKHHHHHH

SEQ ID NO: 134 - protein, 545 aa, Artificial Sequence
  Description of Artificial Sequence: Synthetic polypeptide
MDMRVPAQLLGLLLLWLRGARCAPTSSSTKKTQLQLEHLLLDLQMILNGINNYKNPKLTRMLTFKFYMPKKATELKHLQCLEEELKPLEEVLNLAQSKNFHLRPRDLISNINVIVLELKGSETTFMCEYADETATIVEFLNRWITFCQSIISTLTSGGPGPAGMKGLPGSEVQLVESGGGLVQPGGSLRLSCAASGFTFSSYTLAWVRQAPGKGLEWVAAIDSSSYTYSPDTVRGRFTISRDNAKNSLYLQMNSLRAEDTAVYYCARDSNWDALDYWGQGTTVTVSSGGGGSGGGGSGGGGSDIQMTQSPSSLSASVGDRVTITCKASQNVGTNVGWYQQKPGKAPKALIYSASFRYSGVPSRFSGSGSGTDFTLTISSLQPEDFATYYCQQYYTYPYTFGGGTKVEIKGGGGSGGGGSGGGGSEVQLVESGGGLVQPGNSLRLSCAASGFTFSKFGMSWVRQAPGKGLEWVSSISGSGRDTLYAESVKGRFTISRDNAKTTLYLQMNSLRPEDTAVYYCTIGGSLSVSSQGTLVTVSSHHHHHH

SEQ ID NO: 135 - protein, 575 aa, Artificial Sequence
  Description of Artificial Sequence: Synthetic polypeptide
MDMRVPAQLLGLLLLWLRGARCAPTSSSTKKTQLQLEHLLLDLQMILNGINNYKNPKLTRMLTFKFYMPKKATELKHLQCLEEELKPLEEVLNLAQSKNFHLRPRDLISNINVIVLELKGSETTFMCEYADETATIVEFLNRWITFCQSIISTLTSGGPGPAGMKGLPGSGGGGSGGGGSGGGGSGGGGSGGGGSGGGGSEVQLVESGGGLVQPGGSLRLSCAASGFTFSSYTLAWVRQAPGKGLEWVAAIDSSSYTYSPDTVRGRFTISRDNAKNSLYLQMNSLRAEDTAVYYCARDSNWDALDYWGQGTTVTVSSGGGGSGGGGSGGGGSDIQMTQSPSSLSASVGDRVTITCKASQNVGTNVGWYQQKPGKAPKALIYSASFRYSGVPSRFSGSGSGTDFTLTISSLQPEDFATYYCQQYYTYPYTFGGGTKVEIKGGGGSGGGGSGGGGSEVQLVESGGGLVQPGNSLRLSCAASGFTFSKFGMSWVRQAPGKGLEWVSSISGSGRDTLYAESVKGRFTISRDNAKTTLYLQMNSLRPEDTAVYYCTIGGSLSVSSQGTLVTVSSHHHHHH

SEQ ID NO: 136 - protein, 421 aa, Artificial Sequence
  Description of Artificial Sequence: Synthetic polypeptide
MDMRVPAQLLGLLLLWLRGARCEVQLVESGGGLVQPGNSLRLSCAASGFTFSKFGMSWVRQAPGKGLEWVSSISGSGRDTLYAESVKGRFTISRDNAKTTLYLQMNSLRPEDTAVYYCTIGGSLSVSSQGTLVTVSSSGGPGPAGMKGLPGSAPTSSSTKKTQLQLEHLLLDLQMILNGINNYKNPKLTRMLTFKFYMPKKATELKHLQCLEEELKPLEEVLNLAQSKNFHLRPRDLISNINVIVLELKGSETTFMCEYADETATIVEFLNRWITFCQSIISTLTSGGPGPAGMKGLPGSEVQLVESGGGLVQPGNSLRLSCAASGFTFSKFGMSWVRQAPGKGLEWVSSISGSGRDTLYAESVKGRFTISRDNAKTTLYLQMNSLRPEDTAVYYCTIGGSLSVSSQGTLVTVSSHHHHHH

SEQ ID NO: 137 - protein, 806 aa, Artificial Sequence
  Description of Artificial Sequence: Synthetic polypeptide
MDMRVPAQLLGLLLLWLRGARCQVQLQESGGGLVQAGGSLRLSCAASGRIFSIDIMSWYRQAPGKQRELVARITRGGTISYDDSVKGRFTISRDNAKNTVYLQMNSLKPEDTGVYYCNALYGTDYWGKGTQVTVSSGSGSGSGSGSGSGSGSEVQLVESGGGLVQPGNSLRLSCAASGFTFSKFGMSWVRQAPGKGLEWVSSISGSGRDTLYAESVKGRFTISRDNAKTTLYLQMNSLRPEDTAVYYCTIGGSLSVSSQGTLVTVSSGSGSGSGSGSGSGSGSQVQLQESGGGLVQAGGSLRLSCAASGRIFSIDIMSWYRQAPGKQRELVARITRGGTISYDDSVKGRFTISRDNAKNTVYLQMNSLKPEDTGVYYCNALYGTDYWGKGTQVTVSSGSGSGSGSGSGSGSGSEVQLVESGGGLVQPGGSLRLSCAASGFTFSSYTLAWVRQAPGKGLEWVAAIDSSSYTYSPDTVRGRFTISRDNAKNSLYLQMNSLRAEDTAVYYCARDSNWDALDYWGQGTTVTVSSGGGGSGGGGSGGGGSDIQMTQSPSSLSASVGDRVTITCKASQNVGTNVGWYQQKPGKAPKALIYSASFRYSGVPSRFSGSGSGTDFTLTISSLQPEDFATYYCQQYYTYPYTFGGGTKVEIKSGGPGPAGMKGLPGSAPTSSSTKKTQLQLEHLLLDLQMILNGINNYKNPKLTRMLTFKFYMPKKATELKHLQCLEEELKPLEEVLNLAQSKNFHLRPRDLISNINVIVLELKGSETTFMCEYADETATIVEFLNRWITFCQSIISTLTHHHHHH

SEQ ID NO: 138 - protein, 676 aa, Artificial Sequence
  Description of Artificial Sequence: Synthetic polypeptide
MDMRVPAQLLGLLLLWLRGARCQVQLQESGGGLVQAGGSLRLSCAASGRIFSIDIMSWYRQAPGKQRELVARITRGGTISYDDSVKGRFTISRDNAKNTVYLQMNSLKPEDTGVYYCNALYGTDYWGKGTQVTVSSGSGSGSGSGSGSGSGSEVQLVESGGGLVQPGNSLRLSCAASGFTFSKFGMSWVRQAPGKGLEWVSSISGSGRDTLYAESVKGRFTISRDNAKTTLYLQMNSLRPEDTAVYYCTIGGSLSVSSQGTLVTVSSGSGSGSGSGSGSGSGSEVQLVESGGGLVQPGGSLRLSCAASGFTFSSYTLAWVRQAPGKGLEWVAAIDSSSYTYSPDTVRGRFTISRDNAKNSLYLQMNSLRAEDTAVYYCARDSNWDALDYWGQGTTVTVSSGGGGSGGGGSGGGGSDIQMTQSPSSLSASVGDRVTITCKASQNVGTNVGWYQQKPGKAPKALIYSASFRYSGVPSRFSGSGSGTDFTLTISSLQPEDFATYYCQQYYTYPYTFGGGTKVEIKSGGPGPAGMKGLPGSAPTSSSTKKTQLQLEHLLLDLQMILNGINNYKNPKLTRMLTFKFYMPKKATELKHLQCLEEELKPLEEVLNLAQSKNFHLRPRDLISNINVIVLELKGSETTFMCEYADETATIVEFLNRWITFCQSIISTLTHHHHHH

SEQ ID NO: 139 - protein, 421 aa, Artificial Sequence
  Description of Artificial Sequence: Synthetic polypeptide
MDMRVPAQLLGLLLLWLRGARCQVQLQESGGGLVQAGGSLRLSCAASGRIFSIDIMSWYRQAPGKQRELVARITRGGTISYDDSVKGRFTISRDNAKNTVYLQMNSLKPEDTGVYYCNALYGTDYWGKGTQVTVSSGSGSGSGSGSGSGSGSEVQLVESGGGLVQPGNSLRLSCAASGFTFSKFGMSWVRQAPGKGLEWVSSISGSGRDTLYAESVKGRFTISRDNAKTTLYLQMNSLRPEDTAVYYCTIGGSLSVSSQGTLVTVSSSGGPGPAGMKGLPGSAPTSSSTKKTQLQLEHLLLDLQMILNGINNYKNPKLTRMLTFKFYMPKKATELKHLQCLEEELKPLEEVLNLAQSKNFHLRPRDLISNINVIVLELKGSETTFMCEYADETATIVEFLNRWITFCQSIISTLTHHHHHH

SEQ ID NO: 140 - protein, 420 aa, Artificial Sequence
  Description of Artificial Sequence: Synthetic polypeptide
MDMRVPAQLLGLLLLWLRGARCQVQLQESGGGLVQAGGSLRLSCAASGRIFSIDIMSWYRQAPGKQRELVARITRGGTISYDDSVKGRFTISRDNAKNTVYLQMNSLKPEDTGVYYCNALYGTDYWGKGTQVTVSSSGGPGPAGMKGLPGSAPTSSSTKKTQLQLEHLLLDLQMILNGINNYKNPKLTRMLTFKFYMPKKATELKHLQCLEEELKPLEEVLNLAQSKNFHLRPRDLISNINVIVLELKGSETTFMCEYADETATIVEFLNRWITFCQSIISTLTSGGPGPAGMKGLPGSEVQLVESGGGLVQPGNSLRLSCAASGFTFSKFGMSWVRQAPGKGLEWVSSISGSGRDTLYAESVKGRFTISRDNAKTTLYLQMNSLRPEDTAVYYCTIGGSLSVSSQGTLVTVSSHHHHHH

SEQ ID NO: 141 - protein, 550 aa, Artificial Sequence
  Description of Artificial Sequence: Synthetic polypeptide
MDMRVPAQLLGLLLLWLRGARCQVQLQESGGGLVQAGGSLRLSCAASGRIFSIDIMSWYRQAPGKQRELVARITRGGTISYDDSVKGRFTISRDNAKNTVYLQMNSLKPEDTGVYYCNALYGTDYWGKGTQVTVSSGGGGSGGGGSGGGGSEVQLVESGGGLVQPGNSLRLSCAASGFTFSKFGMSWVRQAPGKGLEWVSSISGSGRDTLYAESVKGRFTISRDNAKTTLYLQMNSLRPEDTAVYYCTIGGSLSVSSQGTLVTVSSSGGPGPAGMKGLPGSAPTSSSTKKTQLQLEHLLLDLQMILNGINNYKNPKLTRMLTFKFYMPKKATELKHLQCLEEELKPLEEVLNLAQSKNFHLRPRDLISNINVIVLELKGSETTFMCEYADETATIVEFLNRWITFCQSIISTLTSGGPGPAGMKGLPGSEVQLVESGGGLVQPGNSLRLSCAASGFTFSKFGMSWVRQAPGKGLEWVSSISGSGRDTLYAESVKGRFTISRDNAKTTLYLQMNSLRPEDTAVYYCTIGGSLSVSSQGTLVTVSSHHHHHH

SEQ ID NO: 142 - protein, 420 aa, Artificial Sequence
  Description of Artificial Sequence: Synthetic polypeptide
MDMRVPAQLLGLLLLWLRGARCQVQLQESGGGLVQAGGSLRLSCAASGRIFSIDIMSWYRQAPGKQRELVARITRGGTISYDDSVKGRFTISRDNAKNTVYLQMNSLKPEDTGVYYCNALYGTDYWGKGTQVTVSSGGGGSGGGGSGGGGSAPTSSSTKKTQLQLEHLLLDLQMILNGINNYKNPKLTRMLTFKFYMPKKATELKHLQCLEEELKPLEEVLNLAQSKNFHLRPRDLISNINVIVLELKGSETTFMCEYADETATIVEFLNRWITFCQSIISTLTSGGPGPAGMKGLPGSEVQLVESGGGLVQPGNSLRLSCAASGFTFSKFGMSWVRQAPGKGLEWVSSISGSGRDTLYAESVKGRFTISRDNAKTTLYLQMNSLRPEDTAVYYCTIGGSLSVSSQGTLVTVSSHHHHHH

SEQ ID NO: 143 - protein, 290 aa, Artificial Sequence
  Description of Artificial Sequence: Synthetic polypeptide
MDMRVPAQLLGLLLLWLRGARCQVQLQESGGGLVQAGGSLRLSCAASGRIFSIDIMSWYRQAPGKQRELVARITRGGTISYDDSVKGRFTISRDNAKNTVYLQMNSLKPEDTGVYYCNALYGTDYWGKGTQVTVSSGGGGSGGGGSGGGGSAPTSSSTKKTQLQLEHLLLDLQMILNGINNYKNPKLTRMLTFKFYMPKKATELKHLQCLEEELKPLEEVLNLAQSKNFHLRPRDLISNINVIVLELKGSETTFMCEYADETATIVEFLNRWITFCQSIISTLTHHHHHH

SEQ ID NO: 144 - protein, 291 aa, Artificial Sequence
  Description of Artificial Sequence: Synthetic polypeptide
MDMRVPAQLLGLLLLWLRGARCAPTSSSTKKTQLQLEHLLLDLQMILNGINNYKNPKLTRMLTFKFYMPKKATELKHLQCLEEELKPLEEVLNLAQSKNFHLRPRDLISNINVIVLELKGSETTFMCEYADETATIVEFLNRWITFCQSIISTLTSGGPGPAGMKGLPGSEVQLVESGGGLVQPGNSLRLSCAASGFTFSKFGMSWVRQAPGKGLEWVSSISGSGRDTLYAESVKGRFTISRDNAKTTLYLQMNSLRPEDTAVYYCTIGGSLSVSSQGTLVTVSSHHHHHH

SEQ ID NO: 145 - protein, 689 aa, Artificial Sequence
  Description of Artificial Sequence: Synthetic polypeptide
MDMRVPAQLLGLLLLWLRGARCQVQLQESGGGLVQAGGSLRLSCAASGRIFSIDIMSWYRQAPGKQRELVARITRGGTISYDDSVKGRFTISRDNAKNTVYLQMNSLKPEDTGVYYCNALYGTDYWGKGTQVTVSSSGGPGPAGMKGLPGSAPTSSSTKKTQLQLEHLLLDLQMILNGINNYKNPKLTRMLTFKFYMPKKATELKHLQCLEEELKPLEEVLNLAQSKNFHLRPRDLISNINVIVLELKGSETTFMCEYADETATIVEFLNRWITFCQSIISTLTSGGPGPAGMKGLPGSEVQLVESGGGLVQPGNSLRLSCAASGFTFSKFGMSWVRQAPGKGLEWVSSISGSGRDTLYAESVKGRFTISRDNAKTTLYLQMNSLRPEDTAVYYCTIGGSLSVSSQGTLVTVSSGGGGSGGGGSGGGGSGGGGSGGGGSGGGGSEVQLVESGGGLVQPGGSLRLSCAASGFTFSSYTLAWVRQAPGKGLEWVAAIDSSSYTYSPDTVRGRFTISRDNAKNSLYLQMNSLRAEDTAVYYCARDSNWDALDYWGQGTTVTVSSGGGGSGGGGSGGGGSDIQMTQSPSSLSASVGDRVTITCKASQNVGTNVGWYQQKPGKAPKALIYSASFRYSGVPSRFSGSGSGTDFTLTISSLQPEDFATYYCQQYYTYPYTFGGGTKVEIKHHHHHH

SEQ ID NO: 146 - protein, 704 aa, Artificial Sequence
  Description of Artificial Sequence: Synthetic polypeptide
MDMRVPAQLLGLLLLWLRGARCAPTSSSTKKTQLQLEHLLLDLQMILNGINNYKNPKLTRMLTFKFYMPKKATELKHLQCLEEELKPLEEVLNLAQSKNFHLRPRDLISNINVIVLELKGSETTFMCEYADETATIVEFLNRWITFCQSIISTLTSGGPGPAGMKGLPGSGGGGSGGGGSGGGGSGGGGSGGGGSGGGGSEVQLVESGGGLVQPGGSLRLSCAASGFTFSSYTLAWVRQAPGKGLEWVAAIDSSSYTYSPDTVRGRFTISRDNAKNSLYLQMNSLRAEDTAVYYCARDSNWDALDYWGQGTTVTVSSGGGGSGGGGSGGGGSDIQMTQSPSSLSASVGDRVTITCKASQNVGTNVGWYQQKPGKAPKALIYSASFRYSGVPSRFSGSGSGTDFTLTISSLQPEDFATYYCQQYYTYPYTFGGGTKVEIKGGGGSGGGGSGGGGSEVQLVESGGGLVQPGNSLRLSCAASGFTFSKFGMSWVRQAPGKGLEWVSSISGSGRDTLYAESVKGRFTISRDNAKTTLYLQMNSLRPEDTAVYYCTIGGSLSVSSQGTLVTVSSGGGGSGGGGSGGGGSQVQLQESGGGLAQAGGSLSLSCAASGFTVSNSVMAWYRQTPGKQREFVAIINSVGSTNYADSVKGRFTISRDNAKNTVYLQMNNLKPEDTAVYVCNRNFDRIYWGQGTQVTVSSHHHHHH

SEQ ID NO: 147 - protein, 674 aa, Artificial Sequence
  Description of Artificial Sequence: Synthetic polypeptide
MDMRVPAQLLGLLLLWLRGARCQVQLQESGGGLAQAGGSLSLSCAASGFTVSNSVMAWYRQTPGKQREFVAIINSVGSTNYADSVKGRFTISRDNAKNTVYLQMNNLKPEDTAVYVCNRNFDRIYWGQGTQVTVSSAPTSSSTKKTQLQLEHLLLDLQMILNGINNYKNPKLTRMLTFKFYMPKKATELKHLQCLEEELKPLEEVLNLAQSKNFHLRPRDLISNINVIVLELKGSETTFMCEYADETATIVEFLNRWITFCQSIISTLTSGGPGPAGMKGLPGSEVQLVESGGGLVQPGNSLRLSCAASGFTFSKFGMSWVRQAPGKGLEWVSSISGSGRDTLYAESVKGRFTISRDNAKTTLYLQMNSLRPEDTAVYYCTIGGSLSVSSQGTLVTVSSGGGGSGGGGSGGGGSGGGGSGGGGSGGGGSEVQLVESGGGLVQPGGSLRLSCAASGFTFSSYTLAWVRQAPGKGLEWVAAIDSSSYTYSPDTVRGRFTISRDNAKNSLYLQMNSLRAEDTAVYYCARDSNWDALDYWGQGTTVTVSSGGGGSGGGGSGGGGSDIQMTQSPSSLSASVGDRVTITCKASQNVGTNVGWYQQKPGKAPKALIYSASFRYSGVPSRFSGSGSGTDFTLTISSLQPEDFATYYCQQYYTYPYTFGGGTKVEIKHHHHHH

SEQ ID NO: 148 - protein, 704 aa, Artificial Sequence
  Description of Artificial Sequence: Synthetic polypeptide
MDMRVPAQLLGLLLLWLRGARCEVQLVESGGGLVQPGGSLRLSCAASGFTFSSYTLAWVRQAPGKGLEWVAAIDSSSYTYSPDTVRGRFTISRDNAKNSLYLQMNSLRAEDTAVYYCARDSNWDALDYWGQGTTVTVSSGGGGSGGGGSGGGGSDIQMTQSPSSLSASVGDRVTITCKASQNVGTNVGWYQQKPGKAPKALIYSASFRYSGVPSRFSGSGSGTDFTLTISSLQPEDFATYYCQQYYTYPYTFGGGTKVEIKGGGGSGGGGSGGGGSGGGGSGGGGSGGGGSSGGPGPAGMKGLPGSAPTSSSTKKTQLQLEHLLLDLQMILNGINNYKNPKLTRMLTFKFYMPKKATELKHLQCLEEELKPLEEVLNLAQSKNFHLRPRDLISNINVIVLELKGSETTFMCEYADETATIVEFLNRWITFCQSIISTLTSGGPGPAGMKGLPGSEVQLVESGGGLVQPGNSLRLSCAASGFTFSKFGMSWVRQAPGKGLEWVSSISGSGRDTLYAESVKGRFTISRDNAKTTLYLQMNSLRPEDTAVYYCTIGGSLSVSSQGTLVTVSSGGGGSGGGGSGGGGSQVQLQESGGGLAQAGGSLSLSCAASGFTVSNSVMAWYRQTPGKQREFVAIINSVGSTNYADSVKGRFTISRDNAKNTVYLQMNNLKPEDTAVYVCNRNFDRIYWGQGTQVTVSSHHHHHH

SEQ ID NO: 149 - protein, 704 aa, Artificial Sequence
  Description of Artificial Sequence: Synthetic polypeptide
MDMRVPAQLLGLLLLWLRGARCQVQLQESGGGLAQAGGSLSLSCAASGFTVSNSVMAWYRQTPGKQREFVAIINSVGSTNYADSVKGRFTISRDNAKNTVYLQMNNLKPEDTAVYVCNRNFDRIYWGQGTQVTVSSGGGGSGGGGSGGGGSEVQLVESGGGLVQPGNSLRLSCAASGFTFSKFGMSWVRQAPGKGLEWVSSISGSGRDTLYAESVKGRFTISRDNAKTTLYLQMNSLRPEDTAVYYCTIGGSLSVSSQGTLVTVSSSGGPGPAGMKGLPGSEVQLVESGGGLVQPGGSLRLSCAASGFTFSSYTLAWVRQAPGKGLEWVAAIDSSSYTYSPDTVRGRFTISRDNAKNSLYLQMNSLRAEDTAVYYCARDSNWDALDYWGQGTTVTVSSGGGGSGGGGSGGGGSDIQMTQSPSSLSASVGDRVTITCKASQNVGTNVGWYQQKPGKAPKALIYSASFRYSGVPSRFSGSGSGTDFTLTISSLQPEDFATYYCQQYYTYPYTFGGGTKVEIKGGGGSGGGGSGGGGSGGGGSGGGGSGGGGSSGGPGPAGMKGLPGSAPTSSSTKKTQLQLEHLLLDLQMILNGINNYKNPKLTRMLTFKFYMPKKATELKHLQCLEEELKPLEEVLNLAQSKNFHLRPRDLISNINVIVLELKGSETTFMCEYADETATIVEFLNRWITFCQSIISTLTHHHHHH

SEQ ID NO: 150 - protein, 689 aa, Artificial Sequence
  Description of Artificial Sequence: Synthetic polypeptide
MDMRVPAQLLGLLLLWLRGARCEVQLVESGGGLVQPGGSLRLSCAASGFTFSSYTLAWVRQAPGKGLEWVAAIDSSSYTYSPDTVRGRFTISRDNAKNSLYLQMNSLRAEDTAVYYCARDSNWDALDYWGQGTTVTVSSGGGGSGGGGSGGGGSDIQMTQSPSSLSASVGDRVTITCKASQNVGTNVGWYQQKPGKAPKALIYSASFRYSGVPSRFSGSGSGTDFTLTISSLQPEDFATYYCQQYYTYPYTFGGGTKVEIKGGGGSGGGGSGGGGSGGGGSGGGGSGGGGSEVQLVESGGGLVQPGNSLRLSCAASGFTFSKFGMSWVRQAPGKGLEWVSSISGSGRDTLYAESVKGRFTISRDNAKTTLYLQMNSLRPEDTAVYYCTIGGSLSVSSQGTLVTVSSSGGPGPAGMKGLPGSAPTSSSTKKTQLQLEHLLLDLQMILNGINNYKNPKLTRMLTFKFYMPKKATELKHLQCLEEELKPLEEVLNLAQSKNFHLRPRDLISNINVIVLELKGSETTFMCEYADETATIVEFLNRWITFCQSIISTLTGGGGSGGGGSGGGGSQVQLQESGGGLAQAGGSLSLSCAASGFTVSNSVMAWYRQTPGKQREFVAIINSVGSTNYADSVKGRFTISRDNAKNTVYLQMNNLKPEDTAVYVCNRNFDRIYWGQGTQVTVSSHHHHHH

SEQ ID NO: 151 - protein, 700 aa, Artificial Sequence
  Description of Artificial Sequence: Synthetic polypeptide
MDMRVPAQLLGLLLLWLRGARCQVQLQESGGGLVQAGGSLRLSCAASGRIFSIDIMSWYRQAPGKQRELVARITRGGTISYDDSVKGRFTISRDNAKNTVYLQMNSLKPEDTGVYYCNALYGTDYWGKGTQVTVSSGGGGSGGGGSGGGGSAPTSSSTKKTQLQLEHLLLDLQMILNGINNYKNPKLTRMLTFKFYMPKKATELKHLQCLEEELKPLEEVLNLAQSKNFHLRPRDLISNINVIVLELKGSETTFMCEYADETATIVEFLNRWITFCQSIISTLTSGGPGPAGMKGLPGSRGETGPAAPGSEVQLVESGGGLVQPGNSLRLSCAASGFTFSKFGMSWVRQAPGKGLEWVSSISGSGRDTLYAESVKGRFTISRDNAKTTLYLQMNSLRPEDTAVYYCTIGGSLSVSSQGTLVTVSSGGGGSGGGGSGGGGSGGGGSGGGGSGGGGSEVQLVESGGGLVQPGGSLRLSCAASGFTFSSYTLAWVRQAPGKGLEWVAAIDSSSYTYSPDTVRGRFTISRDNAKNSLYLQMNSLRAEDTAVYYCARDSNWDALDYWGQGTTVTVSSGGGGSGGGGSGGGGSDIQMTQSPSSLSASVGDRVTITCKASQNVGTNVGWYQQKPGKAPKALIYSASFRYSGVPSRFSGSGSGTDFTLTISSLQPEDFATYYCQQYYTYPYTFGGGTKVEIKHHHHHH

SEQ ID NO: 152 - protein, 276 aa, Artificial Sequence; identical to SEQ ID NO: 102
  Description of Artificial Sequence: Synthetic polypeptide

SEQ ID NO: 153 - protein, 279 aa, Artificial Sequence
  Description of Artificial Sequence: Synthetic polypeptide
MDMRVPAQLLGLLLLWLRGARCQVQLQQSGAELVRPGTSVKVSCKASGYAFTNYLIEWVKQRPGQGLEWIGVINPGSGGTNYNEKFKGKATLTADKSSSTAYMQLSSLTSDDSAVYFCARWRGDGYYAYFDVWGAGTTVTVSSGGGGSGGGGSGGGGSDIVLTQSPASLAVSLGQRATISCKASQSVDYDGDSYMNWYQQKPGQPPKLLIYAASNLESGIPARFSGSGSGTDFTLNIHPVEEEDAATYYCQQSNEDPYTFGGGTKLEIKHHHHHHEPEA

SEQ ID NO: 154 - protein, 279 aa, Artificial Sequence
  Description of Artificial Sequence: Synthetic polypeptide
MDMRVPAQLLGLLLLWLRGARCQVQLQQSGAELVRPGTSVKVSCKASGYAFTNYLIEWVKQRPGQGLEWIGVINPGSGGTNYNEKFKGKATLTADKSSSTAYMQLSSLTSDDSAVYFCARWRGDGYYAYFDVWGAGTTVTVSSSGGPGPAGMKGLPGSDIVLTQSPASLAVSLGQRATISCKASQSVDYDGDSYMNWYQQKPGQPPKLLIYAASNLESGIPARFSGSGSGTDFTLNIHPVEEEDAATYYCQQSNEDPYTFGGGTKLEIKHHHHHHEPEA

SEQ ID NO: 155 - protein, 279 aa, Artificial Sequence
  Description of Artificial Sequence: Synthetic polypeptide
MDMRVPAQLLGLLLLWLRGARCDIVLTQSPASLAVSLGQRATISCKASQSVDYDGDSYMNWYQQKPGQPPKLLIYAASNLESGIPARFSGSGSGTDFTLNIHPVEEEDAATYYCQQSNEDPYTFGGGTKLEIKGGGGSGGGGSGGGGSQVQLQQSGAELVRPGTSVKVSCKASGYAFTNYLIEWVKQRPGQGLEWIGVINPGSGGTNYNEKFKGKATLTADKSSSTAYMQLSSLTSDDSAVYFCARWRGDGYYAYFDVWGAGTTVTVSSHHHHHHEPEA

SEQ ID NO: 156 - protein, 279 aa, Artificial Sequence
  Description of Artificial Sequence: Synthetic polypeptide
MDMRVPAQLLGLLLLWLRGARCDIVLTQSPASLAVSLGQRATISCKASQSVDYDGDSYMNWYQQKPGQPPKLLIYAASNLESGIPARFSGSGSGTDFTLNIHPVEEEDAATYYCQQSNEDPYTFGGGTKLEIKSGGPGPAGMKGLPGSQVQLQQSGAELVRPGTSVKVSCKASGYAFTNYLIEWVKQRPGQGLEWIGVINPGSGGTNYNEKFKGKATLTADKSSSTAYMQLSSLTSDDSAVYFCARWRGDGYYAYFDVWGAGTTVTVSSHHHHHHEPEA

SEQ ID NO: 157 - protein, 295 aa, Artificial Sequence
  Description of Artificial Sequence: Synthetic polypeptide
MDMRVPAQLLGLLLLWLRGARCAPTSSSTKKTQLQLEHLLLDLQMILNGINNYKNPKLTRMLTFKFYMPKKATELKHLQCLEEELKPLEEVLNLAQSKNFHLRPRDLISNINVIVLELKGSETTFMCEYADETATIVEFLNRWITFCQSIISTLTGGGGSGGGGSGGGGSEVQLVESGGGLVQPGNSLRLSCAASGFTFSKFGMSWVRQAPGKGLEWVSSISGSGRDTLYAESVKGRFTISRDNAKTTLYLQMNSLRPEDTAVYYCTIGGSLSVSSQGTLVTVSSHHHHHHEPEA

SEQ ID NO: 158 - protein, 765 aa, Artificial Sequence
  Description of Artificial Sequence: Synthetic polypeptide
MDMRVPAQLLGLLLLWLRGARCAPTSSSTKKTQLQLEHLLLDLQMILNGINNYKNPKLTRMLTFKFYMPKKATELKHLQCLEEELKPLEEVLNLAQSKNFHLRPRDLISNINVIVLELKGSETTFMCEYADETATIVEFLNRWITFCQSIISTLTGGGGSGGGGSGGGGSDAHKSEVAHRFKDLGEENFKALVLIAFAQYLQQCPFEDHVKLVNEVTEFAKTCVADESAENCDKSLHTLFGDKLCTVATLRETYGEMADCCAKQEPERNECFLQHKDDNPNLPRLVRPEVDVMCTAFHDNEETFLKKYLYEIARRHPYFYAPELLFFAKRYKAAFTECCQAADKAACLLPKLDELRDEGKASSAKQRLKCASLQKFGERAFKAWAVARLSQRFPKAEFAEVSKLVTDLTKVHTECCHGDLLECADDRADLAKYICENQDSISSKLKECCEKPLLEKSHCIAEVENDEMPADLPSLAADFVESKDVCKNYAEAKDVFLGMFLYEYARRHPDYSVVLLLRLAKTYETTLEKCCAAADPHECYAKVFDEFKPLVEEPQNLIKQNCELFEQLGEYKFQNALLVRYTKKVPQVSTPTLVEVSRNLGKVGSKCCKHPEAKRMPCAEDYLSVVLNQLCVLHEKTPVSDRVTKCCTESLVNRRPCFSALEVDETYVPKEFNAETFTFHADICTLSEKERQIKKQTALVELVKHKPKATKEQLKAVMDDFAAFVEKCCKADDKETCFAEEGKKLVAASQAALGLHHHHHHEPEA

SEQ ID NO: 159 - protein, 765 aa, Artificial Sequence; identical to SEQ ID NO: 158
  Description of Artificial Sequence: Synthetic polypeptide

SEQ ID NO: 160 - protein, 765 aa, Artificial Sequence
  Description of Artificial Sequence: Synthetic polypeptide
MDMRVPAQLLGLLLLWLRGARCAPTSSSTKKTQLQLEHLLLDLQMILNGINNYKNPKLTRMLTFKFYMPKKATELKHLQCLEEELKPLEEVLNLAQSKNFHLRPRDLISNINVIVLELKGSETTFMCEYADETATIVEFLNRWITFCQSIISTLTSGGPGPAGMKGLPGSDAHKSEVAHRFKDLGEENFKALVLIAFAQYLQQCPFEDHVKLVNEVTEFAKTCVADESAENCDKSLHTLFGDKLCTVATLRETYGEMADCCAKQEPERNECFLQHKDDNPNLPRLVRPEVDVMCTAFHDNEETFLKKYLYEIARRHPYFYAPELLFFAKRYKAAFTECCQAADKAACLLPKLDELRDEGKASSAKQRLKCASLQKFGERAFKAWAVARLSQRFPKAEFAEVSKLVTDLTKVHTECCHGDLLECADDRADLAKYICENQDSISSKLKECCEKPLLEKSHCIAEVENDEMPADLPSLAADFVESKDVCKNYAEAKDVFLGMFLYEYARRHPDYSVVLLLRLAKTYETTLEKCCAAADPHECYAKVFDEFKPLVEEPQNLIKQNCELFEQLGEYKFQNALLVRYTKKVPQVSTPTLVEVSRNLGKVGSKCCKHPEAKRMPCAEDYLSVVLNQLCVLHEKTPVSDRVTKCCTESLVNRRPCFSALEVDETYVPKEFNAETFTFHADICTLSEKERQIKKQTALVELVKHKPKATKEQLKAVMDDFAAFVEKCCKADDKETCFAEEGKKLVAASQAALGLHHHHHHEPEA

SEQ ID NO: 161 - protein, 708 aa, Artificial Sequence
  Description of Artificial Sequence: Synthetic polypeptide
MDMRVPAQLLGLLLLWLRGARCAPTSSSTKKTQLQLEHLLLDLQMILNGINNYKNPKLTRMLTFKFYMPKKATELKHLQCLEEELKPLEEVLNLAQSKNFHLRPRDLISNINVIVLELKGSETTFMCEYADETATIVEFLNRWITFCQSIISTLTSGGPGPAGMKGLPGSEVQLVESGGGLVQPGNSLRLSCAASGFTFSKFGMSWVRQAPGKGLEWVSSISGSGRDTLYAESVKGRFTISRDNAKTTLYLQMNSLRPEDTAVYYCTIGGSLSVSSQGTLVTVSSGGGGSGGGGSGGGGSGGGGSGGGGSGGGGSSGGPGPAGMKGLPGSEVQLVESGGGLVQPGGSLRLSCAASGFTFSSYTLAWVRQAPGKGLEWVAAIDSSSYTYSPDTVRGRFTISRDNAKNSLYLQMNSLRAEDTAVYYCARDSNWDALDYWGQGTTVTVSSGGGGSGGGGSGGGGSDIQMTQSPSSLSASVGDRVTITCKASQNVGTNVGWYQQKPGKAPKALIYSASFRYSGVPSRFSGSGSGTDFTLTISSLQPEDFATYYCQQYYTYPYTFGGGTKVEIKGGGGSGGGGSGGGGSQVQLQESGGGLAQAGGSLSLSCAASGFTVSNSVMAWYRQTPGKQREFVAIINSVGSTNYADSVKGRFTISRDNAKNTVYLQMNNLKPEDTAVYVCNRNFDRIYWGQGTQVTVSSHHHHHHEPEA

SEQ ID NO: 162 - protein, 708 aa, Artificial Sequence
  Description of Artificial Sequence: Synthetic polypeptide
MDMRVPAQLLGLLLLWLRGARCQVQLQESGGGLAQAGGSLSLSCAASGFTVSNSVMAWYRQTPGKQREFVAIINSVGSTNYADSVKGRFTISRDNAKNTVYLQMNNLKPEDTAVYVCNRNFDRIYWGQGTQVTVSSGGGGSGGGGSGGGGSAPTSSSTKKTQLQLEHLLLDLQMILNGINNYKNPKLTRMLTFKFYMPKKATELKHLQCLEEELKPLEEVLNLAQSKNFHLRPRDLISNINVIVLELKGSETTFMCEYADETATIVEFLNRWITFCQSIISTLTSGGPGPAGMKGLPGSEVQLVESGGGLVQPGNSLRLSCAASGFTFSKFGMSWVRQAPGKGLEWVSSISGSGRDTLYAESVKGRFTISRDNAKTTLYLQMNSLRPEDTAVYYCTIGGSLSVSSQGTLVTVSSGGGGSGGGGSGGGGSGGGGSGGGGSGGGGSSGGPGPAGMKGLPGSEVQLVESGGGLVQPGGSLRLSCAASGFTFSSYTLAWVRQAPGKGLEWVAAIDSSSYTYSPDTVRGRFTISRDNAKNSLYLQMNSLRAEDTAVYYCARDSNWDALDYWGQGTTVTVSSGGGGSGGGGSGGGGSDIQMTQSPSSLSASVGDRVTITCKASQNVGTNVGWYQQKPGKAPKALIYSASFRYSGVPSRFSGSGSGTDFTLTISSLQPEDFATYYCQQYYTYPYTFGGGTKVEIKHHHHHHEPEA

SEQ ID NO: 163 - protein, 708 aa, Artificial Sequence
  Description of Artificial Sequence: Synthetic polypeptide
MDMRVPAQLLGLLLLWLRGARCQVQLQESGGGLAQAGGSLSLSCAASGFTVSNSVMAWYRQTPGKQREFVAIINSVGSTNYADSVKGRFTISRDNAKNTVYLQMNNLKPEDTAVYVCNRNFDRIYWGQGTQVTVSSSGGPGPAGMKGLPGSAPTSSSTKKTQLQLEHLLLDLQMILNGINNYKNPKLTRMLTFKFYMPKKATELKHLQCLEEELKPLEEVLNLAQSKNFHLRPRDLISNINVIVLELKGSETTFMCEYADETATIVEFLNRWITFCQSIISTLTSGGPGPAGMKGLPGSEVQLVESGGGLVQPGNSLRLSCAASGFTFSKFGMSWVRQAPGKGLEWVSSISGSGRDTLYAESVKGRFTISRDNAKTTLYLQMNSLRPEDTAVYYCTIGGSLSVSSQGTLVTVSSGGGGSGGGGSGGGGSGGGGSGGGGSGGGGSSGGPGPAGMKGLPGSEVQLVESGGGLVQPGGSLRLSCAASGFTFSSYTLAWVRQAPGKGLEWVAAIDSSSYTYSPDTVRGRFTISRDNAKNSLYLQMNSLRAEDTAVYYCARDSNWDALDYWGQGTTVTVSSGGGGSGGGGSGGGGSDIQMTQSPSSLSASVGDRVTITCKASQNVGTNVGWYQQKPGKAPKALIYSASFRYSGVPSRFSGSGSGTDFTLTISSLQPEDFATYYCQQYYTYPYTFGGGTKVEIKHHHHHHEPEA

SEQ ID NO: 164 - protein, 161 aa, Artificial Sequence
  Description of Artificial Sequence: Synthetic polypeptide
MDMRVPAQLLGLLLLWLRGARCAPTSSSTKKTQLQLEHLLLDLQMILNGINNYKNPKLTRMLTFKFYMPKKATELKHLQCLEEELKPLEEVLNLAQSKNFHLRPRDLISNINVIVLELKGSETTFMCEYADETATIVEFLNRWITFCQSIISTLTHHHHHH

SEQ ID NO: 165 - protein, 708 aa, Artificial Sequence
  Description of Artificial Sequence: Synthetic polypeptide
MDMRVPAQLLGLLLLWLRGARCAPTSSSTKKTQLQLEHLLLDLQMILNGINNYKNPKLTRMLTFKFYMPKKATELKHLQCLEEELKPLEEVLNLAQSKNFHLRPRDLISNINVIVLELKGSETTFMCEYADETATIVEFLNRWITFCQSIISTLTSGGPGPAGMKGLPGSEVQLVESGGGLVQPGNSLRLSCAASGFTFSKFGMSWVRQAPGKGLEWVSSISGSGRDTLYAESVKGRFTISRDNAKTTLYLQMNSLRPEDTAVYYCTIGGSLSVSSQGTLVTVSSGGGGSGGGGSGGGGSGGGGSGGGGSGGGGSSGGPGPAGMKGLPGSEVQLVESGGGLVQPGGSLRLSCAASGFTFSSYTLAWVRQAPGKGLEWVAAIDSSSYTYSPDTVRGRFTISRDNAKNSLYLQMNSLRAEDTAVYYCARDSNWDALDYWGQGTTVTVSSGGGGSGGGGSGGGGSDIQMTQSPSSLSASVGDRVTITCKASQNVGTNVGWYQQKPGKAPKALIYSASFRYSGVPSRFSGSGSGTDFTLTISSLQPEDFATYYCQQYYTYPYTFGGGTKVEIKGGGGSGGGGSGGGGSQVQLQESGGGLVQAGGSLRLSCAASGRIFSIDIMSWYRQAPGKQRELVARITRGGTISYDDSVKGRFTISRDNAKNTVYLQMNSLKPEDTGVYYCNALYGTDYWGKGTQVTVSSHHHHHHEPEA

SEQ ID NO: 166 - protein, 708 aa, Artificial Sequence
  Description of Artificial Sequence: Synthetic polypeptide
MDMRVPAQLLGLLLLWLRGARCQVQLQESGGGLVQAGGSLRLSCAASGRIFSIDIMSWYRQAPGKQRELVARITRGGTISYDDSVKGRFTISRDNAKNTVYLQMNSLKPEDTGVYYCNALYGTDYWGKGTQVTVSSGGGGSGGGGSGGGGSAPTSSSTKKTQLQLEHLLLDLQMILNGINNYKNPKLTRMLTFKFYMPKKATELKHLQCLEEELKPLEEVLNLAQSKNFHLRPRDLISNINVIVLELKGSETTFMCEYADETATIVEFLNRWITFCQSIISTLTSGGPGPAGMKGLPGSEVQLVESGGGLVQPGNSLRLSCAASGFTFSKFGMSWVRQAPGKGLEWVSSISGSGRDTLYAESVKGRFTISRDNAKTTLYLQMNSLRPEDTAVYYCTIGGSLSVSSQGTLVTVSSGGGGSGGGGSGGGGSGGGGSGGGGSGGGGSSGGPGPAGMKGLPGSEVQLVESGGGLVQPGGSLRLSCAASGFTFSSYTLAWVRQAPGKGLEWVAAIDSSSYTYSPDTVRGRFTISRDNAKNSLYLQMNSLRAEDTAVYYCARDSNWDALDYWGQGTTVTVSSGGGGSGGGGSGGGGSDIQMTQSPSSLSASVGDRVTITCKASQNVGTNVGWYQQKPGKAPKALIYSASFRYSGVPSRFSGSGSGTDFTLTISSLQPEDFATYYCQQYYTYPYTFGGGTKVEIKHHHHHHEPEA

SEQ ID NO: 167 - protein, 708 aa, Artificial Sequence
  Description of Artificial Sequence: Synthetic polypeptide
MDMRVPAQLLGLLLLWLRGARCQVQLQESGGGLVQAGGSLRLSCAASGRIFSIDIMSWYRQAPGKQRELVARITRGGTISYDDSVKGRFTISRDNAKNTVYLQMNSLKPEDTGVYYCNALYGTDYWGKGTQVTVSSSGGPGPAGMKGLPGSAPTSSSTKKTQLQLEHLLLDLQMILNGINNYKNPKLTRMLTFKFYMPKKATELKHLQCLEEELKPLEEVLNLAQSKNFHLRPRDLISNINVIVLELKGSETTFMCEYADETATIVEFLNRWITFCQSIISTLTSGGPGPAGMKGLPGSEVQLVESGGGLVQPGNSLRLSCAASGFTFSKFGMSWVRQAPGKGLEWVSSISGSGRDTLYAESVKGRFTISRDNAKTTLYLQMNSLRPEDTAVYYCTIGGSLSVSSQGTLVTVSSGGGGSGGGGSGGGGSGGGGSGGGGSGGGGSSGGPGPAGMKGLPGSEVQLVESGGGLVQPGGSLRLSCAASGFTFSSYTLAWVRQAPGKGLEWVAAIDSSSYTYSPDTVRGRFTISRDNAKNSLYLQMNSLRAEDTAVYYCARDSNWDALDYWGQGTTVTVSSGGGGSGGGGSGGGGSDIQMTQSPSSLSASVGDRVTITCKASQNVGTNVGWYQQKPGKAPKALIYSASFRYSGVPSRFSGSGSGTDFTLTISSLQPEDFATYYCQQYYTYPYTFGGGTKVEIKHHHHHHEPEA

SEQ ID NO: 168 - protein, 450 aa, Artificial Sequence
  Description of Artificial Sequence: Synthetic polypeptide
MDMRVPAQLLGLLLLWLRGARCEVQLVESGGGLVQPGNSLRLSCAASGFTFSKFGMSWVRQAPGKGLEWVSSISGSGRDTLYAESVKGRFTISRDNAKTTLYLQMNSLRPEDTAVYYCTIGGSLSVSSQGTLVTVSSSGGPGPAGMKGLPGSCDLPQTHNLRNKRALTLLVQMRRLSPLSCLKDRKDFGFPQEKVDAQQIKKAQAIPVLSELTQQILNIFTSKDSSAAWNTTLLDSFCNDLHQQLNDLQGCLMQQVGVQEFPLTQEDALLAVRKYFHRITVYLREKKHSPCAWEVVRAEVWRALSSSANVSGGPGPAGMKGLPGSEVQLVESGGGLVQPGNSLRLSCAASGFTFSKFGMSWVRQAPGKGLEWVSSISGSGRDTLYAESVKGRFTISRDNAKTTLYLQMNSLRPEDTAVYYCTIGGSLSVSSQGTLVTVSSHHHHHHEPEA

SEQ ID NO: 169 - protein, 198 aa, Artificial Sequence
  Description of Artificial Sequence: Synthetic polypeptide
MDMRVPAQLLGLLLLWLRGARCCDLPQTHNLRNKRALTLLVQMRRLSPLSCLKDRKDFGFPQEKVDAQQIKKAQAIPVLSELTQQILNIFTSKDSSAAWNTTLLDSFCNDLHQQLNDLQGCLMQQVGVQEFPLTQEDALLAVRKYFHRITVYLREKKHSPCAWEVVRAEVWRALSSSANVLGRLREEKHHHHHHEPEA

SEQ ID NO: 170 - protein, 328 aa, Artificial Sequence
  Description of Artificial Sequence: Synthetic polypeptide
MDMRVPAQLLGLLLLWLRGARCEVQLVESGGGLVQPGNSLRLSCAASGFTFSKFGMSWVRQAPGKGLEWVSSISGSGRDTLYAESVKGRFTISRDNAKTTLYLQMNSLRPEDTAVYYCTIGGSLSVSSQGTLVTVSSSGGPGPAGMKGLPGSCDLPQTHNLRNKRALTLLVQMRRLSPLSCLKDRKDFGFPQEKVDAQQIKKAQAIPVLSELTQQILNIFTSKDSSAAWNTTLLDSFCNDLHQQLNDLQGCLMQQVGVQEFPLTQEDALLAVRKYFHRITVYLREKKHSPCAWEVVRAEVWRALSSSANVLGRLREEKHHHHHHEPEA

SEQ ID NO: 171 - protein, 328 aa, Artificial Sequence
  Description of Artificial Sequence: Synthetic polypeptide
MDMRVPAQLLGLLLLWLRGARCCDLPQTHNLRNKRALTLLVQMRRLSPLSCLKDRKDFGFPQEKVDAQQIKKAQAIPVLSELTQQILNIFTSKDSSAAWNTTLLDSFCNDLHQQLNDLQGCLMQQVGVQEFPLTQEDALLAVRKYFHRITVYLREKKHSPCAWEVVRAEVWRALSSSANVLGRLREEKSGGPGPAGMKGLPGSEVQLVESGGGLVQPGNSLRLSCAASGFTFSKFGMSWVRQAPGKGLEWVSSISGSGRDTLYAESVKGRFTISRDNAKTTLYLQMNSLRPEDTAVYYCTIGGSLSVSSQGTLVTVSSHHHHHHEPEA

SEQ ID NO: 172 - protein, 1396 aa, Artificial Sequence
  Description of Artificial Sequence: Synthetic polypeptide
MDMRVPAQLLGLLLLWLRGARCEAHKSEIAHRYNDLGEQHFKGLVLIAFSQYLQKCSYDEHAKLVQEVTDFAKTCVADESAANCDKSLHTLFGDKLCAIPNLRENYGELADCCTKQEPERNECFLQHKDDNPSLPPFERPEAEAMCTSFKENPTTFMGHYLHEVARRHPYFYAPELLYYAEQYNEILTQCCAEADKESCLTPKLDGVKEKALVSSVRQRMKCSSMQKFGERAFKAWAVARLSQTFPNADFAEITKLATDLTKVNKECCHGDLLECADDRAELAKYMCENQATISSKLQTCCDKPLLKKAHCLSEVEHDTMPADLPAIAADFVEDQEVCKNYAEAKDVFLGTFLYEYSRRHPDYSVSLLLRLAKKYEATLEKCCAEANPPACYGTVLAEFQPLVEEPKNLVKTNCDLYEKLGEYGFQNAILVRYTQKAPQVSTPTLVEAARNLGRVGTKCCTLPEDQRLPCVEDYLSAILNRVCLLHEKTPVSEHVTKCCSGSLVERRPCFSALTVDETYVPKEFKAETFTFHSDICTLPEKEKQIKKQTALAELVKHKPKATAEQLKTVMDDFAQFLDTCCKAADKDTCFSTEGPNLVTRCKDALASGGPGPAGMKGLPGSCDLPQTHNLRNKRALTLLVQMRRLSPLSCLKDRKDFGFPQEKVDAQQIKKAQAIPVLSELTQQILNIFTSKDSSAAWNTTLLDSFCNDLHQQLNDLQGCLMQQVGVQEFPLTQEDALLAVRKYFHRITVYLREKKHSPCAWEVVRAEVWRALSSSANVLGRLREEKSGGPGPAGMKGLPGSEAHKSEIAHRYNDLGEQHFKGLVLIAFSQYLQKCSYDEHAKLVQEVTDFAKTCVADESAANCDKSLHTLFGDKLCAIPNLRENYGELADCCTKQEPERNECFLQHKDDNPSLPPFERPEAEAMCTSFKENPTTFMGHYLHEVARRHPYFYAPELLYYAEQYNEILTQCCAEADKESCLTPKLDGVKEKALVSSVRQRMKCSSMQKFGERAFKAWAVARLSQTFPNADFAEITKLATDLTKVNKECCHGDLLECADDRAELAKYMCENQATISSKLQTCCDKPLLKKAHCLSEVEHDTMPADLPAIAADFVEDQEVCKNYAEAKDVFLGTFLYEYSRRHPDYSVSLLLRLAKKYEATLEKCCAEANPPACYGTVLAEFQPLVEEPKNLVKTNCDLYEKLGEYGFQNAILVRYTQKAPQVSTPTLVEAARNLGRVGTKCCTLPEDQRLPCVEDYLSAILNRVCLLHEKTPVSEHVTKCCSGSLVERRPCFSALTVDETYVPKEFKAETFTFHSDICTLPEKEKQIKKQTALAELVKHKPKATAEQLKTVMDDFAQFLDTCCKAADKDTCFSTEGPNLVTRCKDALAHHHHHHEPEA

SEQ ID NO: 173 - protein, 797 aa, Artificial Sequence
  Description of Artificial Sequence: Synthetic polypeptide
MDMRVPAQLLGLLLLWLRGARCEAHKSEIAHRYNDLGEQHFKGLVLIAFSQYLQKCSYDEHAKLVQEVTDFAKTCVADESAANCDKSLHTLFGDKLCAIPNLRENYGELADCCTKQEPERNECFLQHKDDNPSLPPFERPEAEAMCTSFKENPTTFMGHYLHEVARRHPYFYAPELLYYAEQYNEILTQCCAEADKESCLTPKLDGVKEKALVSSVRQRMKCSSMQKFGERAFKAWAVARLSQTFPNADFAEITKLATDLTKVNKECCHGDLLECADDRAELAKYMCENQATISSKLQTCCDKPLLKKAHCLSEVEHDTMPADLPAIAADFVEDQEVCKNYAEAKDVFLGTFLYEYSRRHPDYSVSLLLRLAKKYEATLEKCCAEANPPACYGTVLAEFQPLVEEPKNLVKTNCDLYEKLGEYGFQNAILVRYTQKAPQVSTPTLVEAARNLGRVGTKCCTLPEDQRLPCVEDYLSAILNRVCLLHEKTPVSEHVTKCCSGSLVERRPCFSALTVDETYVPKEFKAETFTFHSDICTLPEKEKQIKKQTALAELVKHKPKATAEQLKTVMDDFAQFLDTCCKAADKDTCFSTEGPNLVTRCKDALASGGPGPAGMKGLPGSCDLPQTHNLRNKRALTLLVQMRRLSPLSCLKDRKDFGFPQEKVDAQQIKKAQAIPVLSELTQQILNIFTSKDSSAAWNTTLLDSFCNDLHQQLNDLQGCLMQQVGVQEFPLTQEDALLAVRKYFHRITVYLREKKHSPCAWEVVRAEVWRALSSSANVLGRLREEKHHHHHHEPEA

SEQ ID NO: 174 - protein, 797 aa, Artificial Sequence
  Description of Artificial Sequence: Synthetic polypeptide
MDMRVPAQLLGLLLLWLRGARCCDLPQTHNLRNKRALTLLVQMRRLSPLSCLKDRKDFGFPQEKVDAQQIKKAQAIPVLSELTQQILNIFTSKDSSAAWNTTLLDSFCNDLHQQLNDLQGCLMQQVGVQEFPLTQEDALLAVRKYFHRITVYLREKKHSPCAWEVVRAEVWRALSSSANVLGRLREEKSGGPGPAGMKGLPGSEAHKSEIAHRYNDLGEQHFKGLVLIAFSQYLQKCSYDEHAKLVQEVTDFAKTCVADESAANCDKSLHTLFGDKLCAIPNLRENYGELADCCTKQEPERNECFLQHKDDNPSLPPFERPEAEAMCTSFKENPTTFMGHYLHEVARRHPYFYAPELLYYAEQYNEILTQCCAEADKESCLTPKLDGVKEKALVSSVRQRMKCSSMQKFGERAFKAWAVARLSQTFPNADFAEITKLATDLTKVNKECCHGDLLECADDRAELAKYMCENQATISSKLQTCCDKPLLKKAHCLSEVEHDTMPADLPAIAADFVEDQEVCKNYAEAKDVFLGTFLYEYSRRHPDYSVSLLLRLAKKYEATLEKCCAEANPPACYGTVLAEFQPLVEEPKNLVKTNCDLYEKLGEYGFQNAILVRYTQKAPQVSTPTLVEAARNLGRVGTKCCTLPEDQRLPCVEDYLSAILNRVCLLHEKTPVSEHVTKCCSGSLVERRPCFSALTVDETYVPKEFKAETFTFHSDICTLPEKEKQIKKQTALAELVKHKPKATAEQLKTVMDDFAQFLDTCCKAADKDTCFSTEGPNLVTRCKDALAHHHHHHEPEA

SEQ ID NO: 175 - protein, 587 aa, Artificial Sequence
  Description of Artificial Sequence: Synthetic polypeptide
MDMRVPAQLLGLLLLWLRGARCQVQLQESGGGLAQAGGSLSLSCAASGFTVSNSVMAWYRQTPGKQREFVAIINSVGSTNYADSVKGRFTISRDNAKNTVYLQMNNLKPEDTAVYVCNRNFDRIYWGQGTQVTVSSGGGGSGGGGSGGGGSEVQLVESGGGLVQPGNSLRLSCAASGFTFSKFGMSWVRQAPGKGLEWVSSISGSGRDTLYAESVKGRFTISRDNAKTTLYLQMNSLRPEDTAVYYCTIGGSLSVSSQGTLVTVSSSGGPGPAGMKGLPGSCDLPQTHNLRNKRALTLLVQMRRLSPLSCLKDRKDFGFPQEKVDAQQIKKAQAIPVLSELTQQILNIFTSKDSSAAWNTTLLDSFCNDLHQQLNDLQGCLMQQVGVQEFPLTQEDALLAVRKYFHRITVYLREKKHSPCAWEVVRAEVWRALSSSANVLGRLREEKSGGPGPAGMKGLPGSEVQLVESGGGLVQPGNSLRLSCAASGFTFSKFGMSWVRQAPGKGLEWVSSISGSGRDTLYAESVKGRFTISRDNAKTTLYLQMNSLRPEDTAVYYCTIGGSLSVSSQGTLVTVSSHHHHHHEPEA

SEQ ID NO: 176 - protein, 587 aa, Artificial Sequence
  Description of Artificial Sequence: Synthetic polypeptide
MDMRVPAQLLGLLLLWLRGARCEVQLVESGGGLVQPGNSLRLSCAASGFTFSKFGMSWVRQAPGKGLEWVSSISGSGRDTLYAESVKGRFTISRDNAKTTLYLQMNSLRPEDTAVYYCTIGGSLSVSSQGTLVTVSSSGGPGPAGMKGLPGSCDLPQTHNLRNKRALTLLVQMRRLSPLSCLKDRKDFGFPQEKVDAQQIKKAQAIPVLSELTQQILNIFTSKDSSAAWNTTLLDSFCNDLHQQLNDLQGCLMQQVGVQEFPLTQEDALLAVRKYFHRITVYLREKKHSPCAWEVVRAEVWRALSSSANVLGRLREEKSGGPGPAGMKGLPGSEVQLVESGGGLVQPGNSLRLSCAASGFTFSKFGMSWVRQAPGKGLEWVSSISGSGRDTLYAESVKGRFTISRDNAKTTLYLQMNSLRPEDTAVYYCTIGGSLSVSSQGTLVTVSSGGGGSGGGGSGGGGSQVQLQESGGGLAQAGGSLSLSCAASGFTVSNSVMAWYRQTPGKQREFVAIINSVGSTNYADSVKGRFTISRDNAKNTVYLQMNNLKPEDTAVYVCNRNFDRIYWGQGTQVTVSSHHHHHHEPEA

SEQ ID NO: 177 - protein, 458 aa, Artificial Sequence
  Description of Artificial Sequence: Synthetic polypeptide
MDMRVPAQLLGLLLLWLRGARCEVQLVESGGGLVQPGNSLRLSCAASGFTFSKFGMSWVRQAPGKGLEWVSSISGSGRDTLYAESVKGRFTISRDNAKTTLYLQMNSLRPEDTAVYYCTIGGSLSVSSQGTLVTVSSGGGGSGGGGSGGGGSCDLPQTHNLRNKRALTLLVQMRRLSPLSCLKDRKDFGFPQEKVDAQQIKKAQAIPVLSELTQQILNIFTSKDSSAAWNTTLLDSFCNDLHQQLNDLQGCLMQQVGVQEFPLTQEDALLAVRKYFHRITVYLREKKHSPCAWEVVRAEVWRALSSSANVLGRLREEKGGGGSGGGGSGGGGSEVQLVESGGGLVQPGNSLRLSCAASGFTFSKFGMSWVRQAPGKGLEWVSSISGSGRDTLYAESVKGRFTISRDNAKTTLYLQMNSLRPEDTAVYYCTIGGSLSVSSQGTLVTVSSHHHHHHEPEA

SEQ ID NO: 178 - protein, 579 aa, Artificial Sequence
  Description of Artificial Sequence: Synthetic polypeptide
MDMRVPAQLLGLLLLWLRGARCAPTSSSTKKTQLQLEHLLLDLQMILNGINNYKNPKLTRMLTFKFYMPKKATELKHLQCLEEELKPLEEVLNLAQSKNFHLRPRDLISNINVIVLELKGSETTFMCEYADETATIVEFLNRWITFCQSIISTLTSGGPGPAGLYAQPGSEVQLVESGGGLVQPGNSLRLSCAASGFTFSKFGMSWVRQAPGKGLEWVSSISGSGRDTLYAESVKGRFTISRDNAKTTLYLQMNSLRPEDTAVYYCTIGGSLSVSSQGTLVTVSSGGGGSGGGGSGGGGSGGGGSGGGGSGGGGSSGGPGPAGLYAQPGSEVQLVESGGGLVQPGGSLRLSCAASGFTFSSYTLAWVRQAPGKGLEWVAAIDSSSYTYSPDTVRGRFTISRDNAKNSLYLQMNSLRAEDTAVYYCARDSNWDALDYWGQGTTVTVSSGGGGSGGGGSGGGGSDIQMTQSPSSLSASVGDRVTITCKASQNVGTNVGWYQQKPGKAPKALIYSASFRYSGVPSRFSGSGSGTDFTLTISSLQPEDFATYYCQQYYTYPYTFGGGTKVEIKHHHHHHEPEA

SEQ ID NO: 179 - protein, 579 aa, Artificial Sequence
  Description of Artificial Sequence: Synthetic polypeptide
MDMRVPAQLLGLLLLWLRGARCAPTSSSTKKTQLQLEHLLLDLQMILNGINNYKNPKLTRMLTFKFYMPKKATELKHLQCLEEELKPLEEVLNLAQSKNFHLRPRDLISNINVIVLELKGSETTFMCEYADETATIVEFLNRWITFCQSIISTLTSGGPPGGPAGIGPGSEVQLVESGGGLVQPGNSLRLSCAASGFTFSKFGMSWVRQAPGKGLEWVSSISGSGRDTLYAESVKGRFTISRDNAKTTLYLQMNSLRPEDTAVYYCTIGGSLSVSSQGTLVTVSSGGGGSGGGGSGGGGSGGGGSGGGGSGGGGSSGGPPGGPAGIGPGSEVQLVESGGGLVQPGGSLRLSCAASGFTFSSYTLAWVRQAPGKGLEWVAAIDSSSYTYSPDTVRGRFTISRDNAKNSLYLQMNSLRAEDTAVYYCARDSNWDALDYWGQGTTVTVSSGGGGSGGGGSGGGGSDIQMTQSPSSLSASVGDRVTITCKASQNVGTNVGWYQQKPGKAPKALIYSASFRYSGVPSRFSGSGSGTDFTLTISSLQPEDFATYYCQQYYTYPYTFGGGTKVEIKHHHHHHEPEA

SEQ ID NO: 180 - protein, 579 aa, Artificial Sequence
  Description of Artificial Sequence: Synthetic polypeptide
MDMRVPAQLLGLLLLWLRGARCAPTSSSTKKTQLQLEHLLLDLQMILNGINNYKNPKLTRMLTFKFYMPKKATELKHLQCLEEELKPLEEVLNLAQSKNFHLRPRDLISNINVIVLELKGSETTFMCEYADETATIVEFLNRWITFCQSIISTLTSGGPALFKSSFPPGSEVQLVESGGGLVQPGNSLRLSCAASGFTFSKFGMSWVRQAPGKGLEWVSSISGSGRDTLYAESVKGRFTISRDNAKTTLYLQMNSLRPEDTAVYYCTIGGSLSVSSQGTLVTVSSGGGGSGGGGSGGGGSGGGGSGGGGSGGGGSSGGPALFKSSFPPGSEVQLVESGGGLVQPGGSLRLSCAASGFTFSSYTLAWVRQAPGKGLEWVAAIDSSSYTYSPDTVRGRFTISRDNAKNSLYLQMNSLRAEDTAVYYCARDSNWDALDYWGQGTTVTVSSGGGGSGGGGSGGGGSDIQMTQSPSSLSASVGDRVTITCKASQNVGTNVGWYQQKPGKAPKALIYSASFRYSGVPSRFSGSGSGTDFTLTISSLQPEDFATYYCQQYYTYPYTFGGGTKVEIKHHHHHHEPEA

SEQ ID NO: 181 - protein, 581 aa, Artificial Sequence
  Description of Artificial Sequence: Synthetic polypeptide
MDMRVPAQLLGLLLLWLRGARCAPTSSSTKKTQLQLEHLLLDLQMILNGINNYKNPKLTRMLTFKFYMPKKATELKHLQCLEEELKPLEEVLNLAQSKNFHLRPRDLISNINVIVLELKGSETTFMCEYADETATIVEFLNRWITFCQSIISTLTSGGPPLAQKLKSSPGSEVQLVESGGGLVQPGNSLRLSCAASGFTFSKFGMSWVRQAPGKGLEWVSSISGSGRDTLYAESVKGRFTISRDNAKTTLYLQMNSLRPEDTAVYYCTIGGSLSVSSQGTLVTVSSGGGGSGGGGSGGGGSGGGGSGGGGSGGGGSSGGPPLAQKLKSSPGSEVQLVESGGGLVQPGGSLRLSCAASGFTFSSYTLAWVRQAPGKGLEWVAAIDSSSYTYSPDTVRGRFTISRDNAKNSLYLQMNSLRAEDTAVYYCARDSNWDALDYWGQGTTVTVSSGGGGSGGGGSGGGGSDIQMTQSPSSLSASVGDRVTITCKASQNVGTNVGWYQQKPGKAPKALIYSASFRYSGVPSRFSGSGSGTDFTLTISSLQPEDFATYYCQQYYTYPYTFGGGTKVEIKHHHHHHEPEA

SEQ ID NO: 182 - protein, 613 aa, Artificial Sequence
  Description of Artificial Sequence: Synthetic polypeptide
MDMRVPAQLLGLLLLWLRGARCAPTSSSTKKTQLQLEHLLLDLQMILNGINNYKNPKLTRMLTFKFYMPKKATELKHLQCLEEELKPLEEVLNLAQSKNFHLRPRDLISNINVIVLELKGSETTFMCEYADETATIVEFLNRWITFCQSIISTLTSGGPPGGPAGIGALFKSSFPPLAQKLKSSPGSEVQLVESGGGLVQPGNSLRLSCAASGFTFSKFGMSWVRQAPGKGLEWVSSISGSGRDTLYAESVKGRFTISRDNAKTTLYLQMNSLRPEDTAVYYCTIGGSLSVSSQGTLVTVSSGGGGSGGGGSGGGGSGGGGSGGGGSGGGGSSGGPPGGPAGIGALFKSSFPPLAQKLKSSPGSEVQLVESGGGLVQPGGSLRLSCAASGFTFSSYTLAWVRQAPGKGLEWVAAIDSSSYTYSPDTVRGRFTISRDNAKNSLYLQMNSLRAEDTAVYYCARDSNWDALDYWGQGTTVTVSSGGGGSGGGGSGGGGSDIQMTQSPSSLSASVGDRVTITCKASQNVGTNVGWYQQKPGKAPKALIYSASFRYSGVPSRFSGSGSGTDFTLTISSLQPEDFATYYCQQYYTYPYTFGGGTKVEIKHHHHHHEPEA

SEQ ID NO: 183-190 - skipped (8 entries)

SEQ ID NO: 191 - protein, 267 aa, Artificial Sequence
  Description of Artificial Sequence: Synthetic polypeptide
MDMRVPAQLLGLLLLWLRGARCEVQLVESGGGLVQPGGSLRLSCAASGFTFSSYTLAWVRQAPGKGLEWVAAIDSSSYTYSPDTVRGRFTISRDNAKNSLYLQMNSLRAEDTAVYYCARDSNWDALDYWGQGTTVTVSSGGGGSGGGGSGGGGSDIQMTQSPSSLSASVGDRVTITCKASQNVGTNVGWYQQKPGKAPKALIYSASFRYSGVPSRFSGSGSGTDFTLTISSLQPEDFATYYCQQYYTYPYTFGGGTKVEIKHHHHHH

SEQ ID NO: 192 - protein, 269 aa, Artificial Sequence
  Description of Artificial Sequence: Synthetic polypeptide
MDMRVPAQLLGLLLLWLRGARCQSVLTQPPSVSGAPGQRVTISCSGSRSNIGSNTVKWYQQLPGTAPKLLIYYNDQRPSGVPDRFSGSKSGTSASLAITGLQAEDEADYYCQSYDRYTHPALLFGTGTKVTVLGGGGSGGGGSGGGGSQVQLVESGGGVVQPGRSLRLSCAASGFTFSSYGMHWVRQAPGKGLEWVAFIRYDGSNKYYADSVKGRFTISRDNSKNTLYLQMNSLRAEDTAVYYCKTHGSHDNWGQGTMVTVSSHHHHHH

SEQ ID NO: 193 - protein, 171 aa, Artificial Sequence
  Description of Artificial Sequence: Synthetic polypeptide
CDLPQTHSLGSRRTLMLLAQMRRISLFSCLKDRHDFGFPQEEFGNQFQKAETIPVLHEMIQQIFNLFSTKDSSAAWDETLLDKFYTELYQQLNDLEACVIQGVGVTETPLMKEDSILAVRKYFQRITLYLKEKKYSPCAWEVVRAEIMRSFSLSTNLQESLRSKEHHHHHH

SEQ ID NO: 194 - protein, 520 aa, Artificial Sequence; identical to SEQ ID NO: 66
  Description of Artificial Sequence: Synthetic polypeptide

SEQ ID NO: 195 - protein, 141 aa, Artificial Sequence
  Description of Artificial Sequence: Synthetic polypeptide
QVQLQESGGGLVQAGGSLRLSCAASGRTFSSVYDMGWFRQAPGKDREFVARITESARNTRYADSVRGRFTISRDNAKNTVYLQMNNLELEDAAVYYCAADPQTVVVGTPDYWGQGTQVTVSSAAAYPYDVPDYGSHHHHHH

SEQ ID NO: 196 - protein, 247 aa, Artificial Sequence
  Description of Artificial Sequence: Synthetic polypeptide
QSVLTQPPSVSGAPGQRVTISCTGSSSNIGSNTVKWYQQLPGTAPKLLIYGNDQRPSGVPDRFSGSKSGTSASLAITGLQAEDEADYYCQSYDRYTHPAYVFGTGTKVTVLGGGGSGGGGSGGGGSQVQLVESGGGVVQPGRSLRLSCAASGFTFSSYGMHWVRQAPGKGLEWVAFIRYDGSNKYYADSVKGRFTISRDNSKNTLYLQMNSLRAEDTAVYYCKTHGSHDNWGQGTMVTVSSHHHHHH

SEQ ID NO: 197 - protein, 247 aa, Artificial Sequence
  Description of Artificial Sequence: Synthetic polypeptide
QSVLTQPPSVSGAPGQRVTISCTGSSSNIGSNTVKWYQQLPGTAPKLLIYYNDQRPSGVPDRFSGSKSGTSASLAITGLQAEDEADYYCQSYDRYTHPAYVFGTGTKVTVLGGGGSGGGGSGGGGSQVQLVESGGGVVQPGRSLRLSCAASGFTFSSYGMHWVRQAPGKGLEWVAFIRYDGSNKYYADSVKGRFTISRDNSKNTLYLQMNSLRAEDTAVYYCKTHGSHDNWGQGTMVTVSSHHHHHH

SEQ ID NO: 198 - protein, 247 aa, Artificial Sequence
  Description of Artificial Sequence: Synthetic polypeptide
QSVLTQPPSVSGAPGQRVTISCSGSRSNIGSNTVKWYQQLPGTAPKLLIYYNDQRPSGVPDRFSGSKSGTSASLAITGLQAEDEADYYCQSYDRYTHPALLFGTGTKVTVLGGGGSGGGGSGGGGSQVQLVESGGGVVQPGRSLRLSCAASGFTFSSYAMHWVRQAPGKGLEWVAVISYDGSNKYYADSVKGRFTISRDNSKNTLYLQMNSLRAEDTAVYYCARHGSHDNWGQGTMVTVSSHHHHHH

SEQ ID NO: 199 - protein, 247 aa, Artificial Sequence
  Description of Artificial Sequence: Synthetic polypeptide
QSVLTQPPSVSGAPGQRVTISCSGSRSNIGSNTVKWYQQLPGTAPKLLIYYNDQRPSGVPDRFSGSKSGTSASLAITGLQAEDEADYYCQSYDRYTHPALLFGTGTKVTVLGGGGSGGGGSGGGGSQVQLVESGGGVVQPGRSLRLSCAASGFTFSSYGMHWVRQAPGKGLEWVAFIRYEGSNKYYADSVKGRFTISRDNSKNTLYLQMNSLRAEDTAVYYCKTHGSHDNWGQGTMVTVSSHHHHHH

SEQ ID NO: 200 - protein, 247 aa, Artificial Sequence
  Description of Artificial Sequence: Synthetic polypeptide
QSVLTQPPSVSGAPGQRVTISCSGSRSNIGSNTVKWYQQLPGTAPKLLIYYNDQRPSGVPDRFSGSKSGTSASLAITGLQAEDEADYYCQSYDRYTHPALLFGTGTKVTVLGGGGSGGGGSGGGGSQVQLVESGGGVVQPGRSLRLSCAASGFTFSSYGMHWVRQAPGKGLEWVAFIRYDGSNKYYAESVKGRFTISRDNSKNTLYLQMNSLRAEDTAVYYCKTHGSHDNWGQGTMVTVSSHHHHHH

SEQ ID NO: 201 - protein, 247 aa, Artificial Sequence
  Description of Artificial Sequence: Synthetic polypeptide
QSVLTQPPSVSGAPGQRVTISCSGSRSNIGSQTVKWYQQLPGTAPKLLIYYNDQRPSGVPDRFSGSKSGTSASLAITGLQAEDEADYYCQSYERYTHPALLFGTGTKVTVLGGGGSGGGGSGGGGSQVQLVESGGGVVQPGRSLRLSCAASGFTFSSYGMHWVRQAPGKGLEWVAFIRYDGSNKYYADSVKGRFTISRDNSKNTLYLQMNSLRAEDTAVYYCKTHGSHDNWGQGTMVTVSSHHHHHH

SEQ ID NO: 202 - protein, 247 aa, Artificial Sequence
  Description of Artificial Sequence: Synthetic polypeptide
QSVLTQPPSVSGAPGQRVTISCSGSRSNIGSQTVKWYQQLPGTAPKLLIYYNDQRPSGVPDRFSGSKSGTSASLAITGLQAEDEADYYCQSYSRYTHPALLFGTGTKVTVLGGGGSGGGGSGGGGSQVQLVESGGGVVQPGRSLRLSCAASGFTFSSYGMHWVRQAPGKGLEWVAFIRYDGSNKYYADSVKGRFTISRDNSKNTLYLQMNSLRAEDTAVYYCKTHGSHDNWGQGTMVTVSSHHHHHH

SEQ ID NO: 203 - protein, 247 aa, Artificial Sequence
  Description of Artificial Sequence: Synthetic polypeptide
QSVLTQPPSVSGAPGQRVTISCSGSESNIGSNTVKWYQQLPGTAPKLLIYYNDQRPSGVPDRFSGSKSGTSASLAITGLQAEDEADYYCQSYDRYTHPALLFGTGTKVTVLGGGGSGGGGSGGGGSQVQLVESGGGVVQPGRSLRLSCAASGFTFSSYGMHWVRQAPGKGLEWVAFIRYDGSNKYYADSVKGRFTISRDNSKNTLYLQMNSLRAEDTAVYYCKTHGSHDNWGQGTMVTVSSHHHHHH

SEQ ID NO: 204 - protein, 247 aa, Artificial Sequence
  Description of Artificial Sequence: Synthetic polypeptide
QSVLTQPPSVSGAPGQRVTISCSGSSSNIGSNTVKWYQQLPGTAPKLLIYYNDQRPSGVPDRFSGSKSGTSASLAITGLQAEDEADYYCQSYDRYTHPALLFGTGTKVTVLGGGGSGGGGSGGGGSQVQLVESGGGVVQPGRSLRLSCAASGFTFSSYGMHWVRQAPGKGLEWVAFIRYDGSNKYYADSVKGRFTISRDNSKNTLYLQMNSLRAEDTAVYYCKTHGSHDNWGQGTMVTVSSHHHHHH

SEQ ID NO: 205 - protein, 247 aa, Artificial Sequence
  Description of Artificial Sequence: Synthetic polypeptide
QSVLTQPPSVSGAPGQRVTISCSGSRSNIGDNTVKWYQQLPGTAPKLLIYYNDQRPSGVPDRFSGSKSGTSASLAITGLQAEDEADYYCQSYDRYTHPALLFGTGTKVTVLGGGGSGGGGSGGGGSQVQLVESGGGVVQPGRSLRLSCAASGFTFSSYGMHWVRQAPGKGLEWVAFIRYDGSNKYYADSVKGRFTISRDNSKNTLYLQMNSLRAEDTAVYYCKTHGSHDNWGQGTMVTVSSHHHHHH

SEQ ID NO: 206 - protein, 247 aa, Artificial Sequence
  Description of Artificial Sequence: Synthetic polypeptide
QSVLTQPPSVSGAPGQRVTISCSGSRSNIGENTVKWYQQLPGTAPKLLIYYNDQRPSGVPDRFSGSKSGTSASLAITGLQAEDEADYYCQSYDRYTHPALLFGTGTKVTVLGGGGSGGGGSGGGGSQVQLVESGGGVVQPGRSLRLSCAASGFTFSSYGMHWVRQAPGKGLEWVAFIRYDGSNKYYADSVKGRFTISRDNSKNTLYLQMNSLRAEDTAVYYCKTHGSHDNWGQGTMVTVSSHHHHHH

SEQ ID NO: 207 - protein, 247 aa, Artificial Sequence
  Description of Artificial Sequence: Synthetic polypeptide
QSVLTQPPSVSGAPGQRVTISCSGSRSNIGSDTVKWYQQLPGTAPKLLIYYNDQRPSGVPDRFSGSKSGTSASLAITGLQAEDEADYYCQSYDRYTHPALLFGTGTKVTVLGGGGSGGGGSGGGGSQVQLVESGGGVVQPGRSLRLSCAASGFTFSSYGMHWVRQAPGKGLEWVAFIRYDGSNKYYADSVKGRFTISRDNSKNTLYLQMNSLRAEDTAVYYCKTHGSHDNWGQGTMVTVSSHHHHHH

SEQ ID NO: 208 - protein, 247 aa, Artificial Sequence
  Description of Artificial Sequence: Synthetic polypeptide
QSVLTQPPSVSGAPGQRVTISCSGSRSNIGSETVKWYQQLPGTAPKLLIYYNDQRPSGVPDRFSGSKSGTSASLAITGLQAEDEADYYCQSYDRYTHPALLFGTGTKVTVLGGGGSGGGGSGGGGSQVQLVESGGGVVQPGRSLRLSCAASGFTFSSYGMHWVRQAPGKGLEWVAFIRYDGSNKYYADSVKGRFTISRDNSKNTLYLQMNSLRAEDTAVYYCKTHGSHDNWGQGTMVTVSSHHHHHH

SEQ ID NO: 209 - protein, 247 aa, Artificial Sequence
  Description of Artificial Sequence: Synthetic polypeptide
QSVLTQPPSVSGAPGQRVTISCSGSRSNIGSNDVKWYQQLPGTAPKLLIYYNDQRPSGVPDRFSGSKSGTSASLAITGLQAEDEADYYCQSYDRYTHPALLFGTGTKVTVLGGGGSGGGGSGGGGSQVQLVESGGGVVQPGRSLRLSCAASGFTFSSYGMHWVRQAPGKGLEWVAFIRYDGSNKYYADSVKGRFTISRDNSKNTLYLQMNSLRAEDTAVYYCKTHGSHDNWGQGTMVTVSSHHHHHH

SEQ ID NO: 210 - protein, 247 aa, Artificial Sequence
  Description of Artificial Sequence: Synthetic polypeptide
QSVLTQPPSVSGAPGQRVTISCSGSRSNIGSNTVDWYQQLPGTAPKLLIYYNDQRPSGVPDRFSGSKSGTSASLAITGLQAEDEADYYCQSYDRYTHPALLFGTGTKVTVLGGGGSGGGGSGGGGSQVQLVESGGGVVQPGRSLRLSCAASGFTFSSYGMHWVRQAPGKGLEWVAFIRYDGSNKYYADSVKGRFTISRDNSKNTLYLQMNSLRAEDTAVYYCKTHGSHDNWGQGTMVTVSSHHHHHH

SEQ ID NO: 211 - protein, 247 aa, Artificial Sequence
  Description of Artificial Sequence: Synthetic polypeptide
QSVLTQPPSVSGAPGQRVTISCSGSRSNIGSNTVEWYQQLPGTAPKLLIYYNDQRPSGVPDRFSGSKSGTSASLAITGLQAEDEADYYCQSYDRYTHPALLFGTGTKVTVLGGGGSGGGGSGGGGSQVQLVESGGGVVQPGRSLRLSCAASGFTFSSYGMHWVRQAPGKGLEWVAFIRYDGSNKYYADSVKGRFTISRDNSKNTLYLQMNSLRAEDTAVYYCKTHGSHDNWGQGTMVTVSSHHHHHH

SEQ ID NO: 212 - protein, 247 aa, Artificial Sequence
  Description of Artificial Sequence: Synthetic polypeptide
QSVLTQPPSVSGAPGQRVTISCSGSRSNIGSNTVKWYQQLPGTAPKLLIYYNDQDPSGVPDRFSGSKSGTSASLAITGLQAEDEADYYCQSYDRYTHPALLFGTGTKVTVLGGGGSGGGGSGGGGSQVQLVESGGGVVQPGRSLRLSCAASGFTFSSYGMHWVRQAPGKGLEWVAFIRYDGSNKYYADSVKGRFTISRDNSKNTLYLQMNSLRAEDTAVYYCKTHGSHDNWGQGTMVTVSSHHHHHH

SEQ ID NO: 213 - protein, 247 aa, Artificial Sequence
  Description of Artificial Sequence: Synthetic polypeptide
QSVLTQPPSVSGAPGQRVTISCSGSRSNIGSNTVKWYQQLPGTAPKLLIYYNDQEPSGVPDRFSGSKSGTSASLAITGLQAEDEADYYCQSYDRYTHPALLFGTGTKVTVLGGGGSGGGGSGGGGSQVQLVESGGGVVQPGRSLRLSCAASGFTFSSYGMHWVRQAPGKGLEWVAFIRYDGSNKYYADSVKGRFTISRDNSKNTLYLQMNSLRAEDTAVYYCKTHGSHDNWGQGTMVTVSSHHHHHH

SEQ ID NO: 214 - protein, 247 aa, Artificial Sequence
  Description of Artificial Sequence: Synthetic polypeptide
QSVLTQPPSVSGAPGQRVTISCSGSRSNIGSNTVKWYQQLPGTAPKLLIYYNDQRPDGVPDRFSGSKSGTSASLAITGLQAEDEADYYCQSYDRYTHPALLFGTGTKVTVLGGGGSGGGGSGGGGSQVQLVESGGGVVQPGRSLRLSCAASGFTFSSYGMHWVRQAPGKGLEWVAFIRYDGSNKYYADSVKGRFTISRDNSKNTLYLQMNSLRAEDTAVYYCKTHGSHDNWGQGTMVTVSSHHHHHH

SEQ ID NO: 215 - protein, 247 aa, Artificial Sequence
  Description of Artificial Sequence: Synthetic polypeptide
QSVLTQPPSVSGAPGQRVTISCSGSRSNIGSNTVKWYQQLPGTAPKLLIYYNDQRPSGVPDRFSGSKSGTSASLAITGLQAEDEADYYCQSYDEYTHPALLFGTGTKVTVLGGGGSGGGGSGGGGSQVQLVESGGGVVQPGRSLRLSCAASGFTFSSYGMHWVRQAPGKGLEWVAFIRYDGSNKYYADSVKGRFTISRDNSKNTLYLQMNSLRAEDTAVYYCKTHGSHDNWGQGTMVTVSSHHHHHH

SEQ ID NO: 216 - protein, 247 aa, Artificial Sequence
  Description of Artificial Sequence: Synthetic polypeptide
QSVLTQPPSVSGAPGQRVTISCSGSRSNIGSNTVKWYQQLPGTAPKLLIYYNDQRPSGVPDRFSGSKSGTSASLAITGLQAEDEADYYCQSYDRYTDPALLFGTGTKVTVLGGGGSGGGGSGGGGSQVQLVESGGGVVQPGRSLRLSCAASGFTFSSYGMHWVRQAPGKGLEWVAFIRYDGSNKYYADSVKGRFTISRDNSKNTLYLQMNSLRAEDTAVYYCKTHGSHDNWGQGTMVTVSSHHHHHH

SEQ ID NO: 217 - protein, 247 aa, Artificial Sequence
  Description of Artificial Sequence: Synthetic polypeptide
QSVLTQPPSVSGAPGQRVTISCSGSESNIGSNTVKWYQQLPGTAPKLLIYYNDQEPSGVPDRFSGSKSGTSASLAITGLQAEDEADYYCQSYDEYTHPALLFGTGTKVTVLGGGGSGGGGSGGGGSQVQLVESGGGVVQPGRSLRLSCAASGFTFSSYGMHWVRQAPGKGLEWVAFIRYDGSNKYYADSVKGRFTISRDNSKNTLYLQMNSLRAEDTAVYYCKTHGSHDNWGQGTMVTVSSHHHHHH

SEQ ID NO: 218 - protein, 247 aa, Artificial Sequence
  Description of Artificial Sequence: Synthetic polypeptide
QSVLTQPPSVSGAPGQRVTISCSGSESNIGSNDVKWYQQLPGTAPKLLIYYNDQRPSGVPDRFSGSKSGTSASLAITGLQAEDEADYYCQSYDRYTHPALLFGTGTKVTVLGGGGSGGGGSGGGGSQVQLVESGGGVVQPGRSLRLSCAASGFTFSSYGMHWVRQAPGKGLEWVAFIRYDGSNKYYADSVKGRFTISRDNSKNTLYLQMNSLRAEDTAVYYCKTHGSHDNWGQGTMVTVSSHHHHHH

SEQ ID NO: 219 - protein, 247 aa, Artificial Sequence
  Description of Artificial Sequence: Synthetic polypeptide
QSVLTQPPSVSGAPGQRVTISCSGSRSNIGSNTVKWYQQLPGTAPKLLIYYNDQRPSGVPDRFSGSKSGTSASLAITGLQAEDEADYYCQSYDRYTHPALLFGTGTKVTVLGGGGSGGGGSGGGGSQVQLVESGGGVVQPGRSLRLSCAASGFTFESYGMHWVRQAPGKGLEWVAFIRYDGSNKYYADSVKGRFTISRDNSKNTLYLQMNSLRAEDTAVYYCKTHGSHDNWGQGTMVTVSSHHHHHH

SEQ ID NO: 220 - protein, 247 aa, Artificial Sequence
  Description of Artificial Sequence: Synthetic polypeptide
QSVLTQPPSVSGAPGQRVTISCSGSRSNIGSNTVKWYQQLPGTAPKLLIYYNDQRPSGVPDRFSGSKSGTSASLAITGLQAEDEADYYCQSYDRYTHPALLFGTGTKVTVLGGGGSGGGGSGGGGSQVQLVESGGGVVQPGRSLRLSCAASGFTFSEYGMHWVRQAPGKGLEWVAFIRYDGSNKYYADSVKGRFTISRDNSKNTLYLQMNSLRAEDTAVYYCKTHGSHDNWGQGTMVTVSSHHHHHH

SEQ ID NO: 221 - protein, 247 aa, Artificial Sequence
  Description of Artificial Sequence: Synthetic polypeptide
QSVLTQPPSVSGAPGQRVTISCSGSRSNIGSNTVKWYQQLPGTAPKLLIYYNDQRPSGVPDRFSGSKSGTSASLAITGLQAEDEADYYCQSYDRYTHPALLFGTGTKVTVLGGGGSGGGGSGGGGSQVQLVESGGGVVQPGRSLRLSCAASGFTFSDYGMHWVRQAPGKGLEWVAFIRYDGSNKYYADSVKGRFTISRDNSKNTLYLQMNSLRAEDTAVYYCKTHGSHDNWGQGTMVTVSSHHHHHH

SEQ ID NO: 222 - protein, 247 aa, Artificial Sequence
  Description of Artificial Sequence: Synthetic polypeptide
QSVLTQPPSVSGAPGQRVTISCSGSRSNIGSNTVKWYQQLPGTAPKLLIYYNDQRPSGVPDRFSGSKSGTSASLAITGLQAEDEADYYCQSYDRYTHPALLFGTGTKVTVLGGGGSGGGGSGGGGSQVQLVESGGGVVQPGRSLRLSCAASGFTFSSYGMHWVRQAPGKGLEWVAFIEYDGSNKYYADSVKGRFTISRDNSKNTLYLQMNSLRAEDTAVYYCKTHGSHDNWGQGTMVTVSSHHHHHH

SEQ ID NO: 223 - protein, 247 aa, Artificial Sequence
  Description of Artificial Sequence: Synthetic polypeptide
QSVLTQPPSVSGAPGQRVTISCSGSRSNIGSNTVKWYQQLPGTAPKLLIYYNDQRPSGVPDRFSGSKSGTSASLAITGLQAEDEADYYCQSYDRYTHPALLFGTGTKVTVLGGGGSGGGGSGGGGSQVQLVESGGGVVQPGRSLRLSCAASGFTFSSYGMHWVRQAPGKGLEWVAFIDYDGSNKYYADSVKGRFTISRDNSKNTLYLQMNSLRAEDTAVYYCKTHGSHDNWGQGTMVTVSSHHHHHH

SEQ ID NO: 224 - protein, 247 aa, Artificial Sequence
  Description of Artificial Sequence: Synthetic polypeptide
QSVLTQPPSVSGAPGQRVTISCSGSRSNIGSNTVKWYQQLPGTAPKLLIYYNDQRPSGVPDRFSGSKSGTSASLAITGLQAEDEADYYCQSYDRYTHPALLFGTGTKVTVLGGGGSGGGGSGGGGSQVQLVESGGGVVQPGRSLRLSCAASGFTFSSYGMHWVRQAPGKGLEWVAFIRYDGSNDYYADSVKGRFTISRDNSKNTLYLQMNSLRAEDTAVYYCKTHGSHDNWGQGTMVTVSSHHHHHH

SEQ ID NO: 225 - protein, 247 aa, Artificial Sequence
  Description of Artificial Sequence: Synthetic polypeptide
QSVLTQPPSVSGAPGQRVTISCSGSRSNIGSNTVKWYQQLPGTAPKLLIYYNDQRPSGVPDRFSGSKSGTSASLAITGLQAEDEADYYCQSYDRYTHPALLFGTGTKVTVLGGGGSGGGGSGGGGSQVQLVESGGGVVQPGRSLRLSCAASGFTFSSYGMHWVRQAPGKGLEWVAFIRYDGSNEYYADSVKGRFTISRDNSKNTLYLQMNSLRAEDTAVYYCKTHGSHDNWGQGTMVTVSSHHHHHH

SEQ ID NO: 226 - protein, 247 aa, Artificial Sequence
  Description of Artificial Sequence: Synthetic polypeptide
QSVLTQPPSVSGAPGQRVTISCSGSRSNIGSNTVKWYQQLPGTAPKLLIYYNDQRPSGVPDRFSGSKSGTSASLAITGLQAEDEADYYCQSYDRYTHPALLFGTGTKVTVLGGGGSGGGGSGGGGSQVQLVESGGGVVQPGRSLRLSCAASGFTFSSYGMHWVRQAPGKGLEWVAFIRYDGSNKYYADSVEGRFTISRDNSKNTLYLQMNSLRAEDTAVYYCKTHGSHDNWGQGTMVTVSSHHHHHH

SEQ ID NO: 227 - protein, 247 aa, Artificial Sequence
  Description of Artificial Sequence: Synthetic polypeptide
QSVLTQPPSVSGAPGQRVTISCSGSRSNIGSNTVKWYQQLPGTAPKLLIYYNDQRPSGVPDRFSGSKSGTSASLAITGLQAEDEADYYCQSYDRYTHPALLFGTGTKVTVLGGGGSGGGGSGGGGSQVQLVESGGGVVQPGRSLRLSCAASGFTFSSYGMHWVRQAPGKGLEWVAFIRYDGSNKYYADSVKGRFTISRDNSKNTLYLQMNSLRAEDTAVYYCKTHGSEDNWGQGTMVTVSSHHHHHH

SEQ ID NO: 228 - protein, 247 aa, Artificial Sequence
  Description of Artificial Sequence: Synthetic polypeptide
QSVLTQPPSVSGAPGQRVTISCSGSRSNIGSNTVKWYQQLPGTAPKLLIYYNDQRPSGVPDRFSGSKSGTSASLAITGLQAEDEADYYCQSYDRYTHPALLFGTGTKVTVLGGGGSGGGGSGGGGSQVQLVESGGGVVQPGRSLRLSCAASGFTFSSYGMHWVRQAPGKGLEWVAFIEYDGSNKYYADSVEGRFTISRDNSKNTLYLQMNSLRAEDTAVYYCKTHGSHDNWGQGTMVTVSSHHHHHH

SEQ ID NO: 229 - protein, 247 aa, Artificial Sequence
  Description of Artificial Sequence: Synthetic polypeptide
QSVLTQPPSVSGAPGQRVTISCSGSRSNIGSNTVKWYQQLPGTAPKLLIYYNDQRPSGVPDRFSGSKSGTSASLAITGLQAEDEADYYCQSYDRYTHPALLFGTGTKVTVLGGGGSGGGGSGGGGSQVQLVESGGGVVQPGRSLRLSCAASGFTFSSYGMHWVRQAPGKGLEWVAFIEYDGSNKYYADSVEGRFTISRDNSKNTLYLQMNSLRAEDTAVYYCKTHGSEDNWGQGTMVTVSSHHHHHH

SEQ ID NO: 230 - protein, 247 aa, Artificial Sequence
  Description of Artificial Sequence: Synthetic polypeptide
QSVLTQPPSVSGAPGQRVTISCSGSRSNIGSNTVKWYQQLPGTAPKLLIYYNDQRPSGVPDRFSGSKSGTSASLAITGLQAEDEADYYCQSYDRYTHPALLFGTGTKVTVLGGGGSGGGGSGGGGSQVQLVESGGGVVQPGRSLRLSCAASGFTFSSYGMHWVRQAPGKGLEWVAFIRYDGSNKYYADSVKGRFTISRDNSKNTLYLQMNSLRAEDTAVYYCKTHGSHDNWGQGTMVTVSSHHHHHH

SEQ ID NO: 231 - protein, 306 aa, Artificial Sequence
  Description of Artificial Sequence: Synthetic polypeptide
IWELKKDVYVVELDWYPDAPGEMVVLTCDTPEEDGITWTLDQSSEVLGSGKTLTIQVKEFGDAGQYTCHKGGEVLSHSLLLLHKKEDGIWSTDILKDQKEPKNKTFLRCEAKNYSGRFTCWWLTTISTDLTFSVKSSRGSSDPQGVTCGAATLSAERVRGDNKEYEYSVECQEDSACPAAEESLPIEVMVDAVHKLKYENYTSSFFIRDIIKPDPPKNLQLKPLKNSRQVEVSWEYPDTWSTPHSYFSLTFCVQVQGKSKREKKDRVFTDKTSATVICRKNASISVRAQDRYYSSSWSEWASVPCS

SEQ ID NO: 232 - protein, 137 aa, Artificial Sequence
  Description of Artificial Sequence: Synthetic polypeptide
QVQLQESGGGLVQTGGSLRLSCTTSGTIFSGYTMGWYRQAPGEQRELVAVISGGGDTNYADSVKGRFTISRDNTKDTMYLQMNSLKPEDTAVYYCYSREVTPPWKLYWGQGTQVTVSSAAAYPYDVPDYGSHHHHHH

SEQ ID NO: 233 - protein, 137 aa, Artificial Sequence
  Description of Artificial Sequence: Synthetic polypeptide
QVQLQESGGGLVQEGGSLRLSCAASERIFSTDVMGWYRQAAEKQRELVAVVSARGTTNYLDAVKGRFTISRDNARNTLTLQMNDLKPEDTASYYCYVRETTSPWRIYWGQGTQVTVSSAAAYPYDVPDYGSHHHHHH

SEQ ID NO: 234 - protein, 138 aa, Artificial Sequence
  Description of Artificial Sequence: Synthetic polypeptide
QVQLQESGGGLVQAGGSLRLSCAASGSIFSANAMGWYRQAPGKQRELVAVISSGGSTNYADSVKGRFTISRDNAKNTVYLQMNSLKPEDTAVYYCMYSGSYYYTPNDYWGQGTQVTVSSAAAYPYDVPDYGSHHHHHH

SEQ ID NO: 235 - protein, 245 aa, Artificial Sequence
  Description of Artificial Sequence: Synthetic polypeptide
EVQLVESGGGLVQPGGSLRLSCAASGFTFSSYTLAWVRQAPGKGLEWVAAIDSSSYTYSPDTVRGRFTISRDNAKNSLYLQMNSLRAEDTAVYYCARDSNWDALDYWGQGTTVTVSSGGGGSGGGGSGGGGSDIQMTQSPSSLSASVGDRVTITCKASQNVGTNVGWYQQKPGKAPKALIYSASFRYSGVPSRFSGSGSGTDFTLTISSLQPEDFATYYCQQYYTYPYTFGGGTKVEIKHHHHHH

SEQ ID NO: 236 - protein, 138 aa, Artificial Sequence
  Description of Artificial Sequence: Synthetic polypeptide
EVQLLESGGGLVQPGGSLRLSCAASGSIFSANAMGWYRQAPGKQRELVAVISSGGSTNYADSVKGRFTISRDNSKNTVYLQMNSLRAEDTAVYYCMYSGSYYYTPNDYWGQGTLVTVSSAAAYPYDVPDYGSHHHHHH

SEQ ID NO: 237 - protein, 138 aa, Artificial Sequence
  Description of Artificial Sequence: Synthetic polypeptide
EVQLLESGGGLVQPGGSLRLSCAASGSIFSANAMGWYRQAPGKGLELVAVISSGGSTNYADSVKGRFTISRDNSKNTVYLQMNSLRAEDTAVYYCMYSGSYYYTPNDYWGQGTLVTVSSAAAYPYDVPDYGSHHHHHH

SEQ ID NO: 238 - protein, 138 aa, Artificial Sequence
  Description of Artificial Sequence: Synthetic polypeptide
EVQLLESGGGLVQPGGSLRLSCAASGSIFSANAMGWVRQAPGKGLEWVSVISSGGSTNYADSVKGRFTISRDNSKNTLYLQMNSLRAEDTAVYYCMYSGSYYYTPNDYWGQGTLVTVSSAAAYPYDVPDYGSHHHHHH

SEQ ID NO: 239 - protein, 138 aa, Artificial Sequence
  Description of Artificial Sequence: Synthetic polypeptide
QVQLLESGGGLVQPGGSLRLSCAASGSIFSANAMGWYRQAPGKQRELVAVISSGGSTNYADSVKGRFTISRDNSKNTVYLQMNSLRAEDTAVYYCMYSGSYYYTPNDYWGQGTLVTVSSAAAYPYDVPDYGSHHHHHH

SEQ ID NO: 240 - protein, 138 aa, Artificial Sequence
  Description of Artificial Sequence: Synthetic polypeptide
EVQLLESGGGLVQPGGSLRLSCAASGSIFSANAMGWYRQAPGKGRELVAVISSGGSTNYADSVKGRFTISRDNSKNTVYLQMNSLRAEDTAVYYCMYSGSYYYTPNDYWGQGTLVTVSSAAAYPYDVPDYGSHHHHHH

SEQ ID NO: 241 - protein, 138 aa, Artificial Sequence
  Description of Artificial Sequence: Synthetic polypeptide
QVQLLESGGGLVQAGGSLRLSCAASGSIFSANAMGWYRQAPGKQRELVAVISSGGSTNYADSVKGRFTISRDNSKNTVYLQMNSLRAEDTAVYYCMYSGSYYYTPNDYWGQGTLVTVSSAAAYPYDVPDYGSHHHHHH

SEQ ID NO: 242 - protein, 137 aa, Artificial Sequence
  Description of Artificial Sequence: Synthetic polypeptide
EVQLLESGGGLVQPGGSLRLSCAASERIFSTDVMGWYRQAPGKQRELVAVVSARGTTNYLDAVKGRFTISRDNSKNTLYLQMNSLRAEDTAVYYCYVRETTSPWRIYWGQGTLVTVSSAAAYPYDVPDYGSHHHHHH

SEQ ID NO: 243 - protein, 137 aa, Artificial Sequence
  Description of Artificial Sequence: Synthetic polypeptide
EVQLLESGGGLVQPGGSLRLSCAASERIFSTDVMGWYRQAPGKGLELVAVVSARGTTNYLDAVKGRFTISRDNSKNTLYLQMNSLRAEDTAVYYCYVRETTSPWRIYWGQGTLVTVSSAAAYPYDVPDYGSHHHHHH

SEQ ID NO: 244 - protein, 137 aa, Artificial Sequence
  Description of Artificial Sequence: Synthetic polypeptide
EVQLLESGGGLVQPGGSLRLSCAASERIFSTDVMGWVRQAPGKGLEWVSVVSARGTTNYLDAVKGRFTISRDNSKNTLYLQMNSLRAEDTAVYYCYVRETTSPWRIYWGQGTLVTVSSAAAYPYDVPDYGSHHHHHH

SEQ ID NO: 245 - protein, 137 aa, Artificial Sequence
  Description of Artificial Sequence: Synthetic polypeptide
QVQLLESGGGLVQPGGSLRLSCAASERIFSTDVMGWYRQAPGKQRELVAVVSARGTTNYLDAVKGRFTISRDNSKNTLYLQMNSLRAEDTAVYYCYVRETTSPWRIYWGQGTLVTVSSAAAYPYDVPDYGSHHHHHH

SEQ ID NO: 246 - protein, 137 aa, Artificial Sequence
  Description of Artificial Sequence: Synthetic polypeptide
EVQLLESGGGLVQPGGSLRLSCAASERIFSTDVMGWYRQAPGKGRELVAVVSARGTTNYLDSVKGRFTISRDNSKNTLYLQMNSLRAEDTAVYYCYVRETTSPWRIYWGQGTLVTVSSAAAYPYDVPDYGSHHHHHH

SEQ ID NO: 247 - protein, 137 aa, Artificial Sequence
  Description of Artificial Sequence: Synthetic polypeptide
QVQLLESGGGLVQEGGSLRLSCAASERIFSTDVMGWYRQAAGKQRELVAVVSARGTTNYLDAVKGRFTISRDNSKNTLYLQMNSLRAEDTASYYCYVRETTSPWRIYWGQGTLVTVSSAAAYPYDVPDYGSHHHHHH

SEQ ID NO: 248 - protein, 137 aa, Artificial Sequence
  Description of Artificial Sequence: Synthetic polypeptide
EVQLLESGGGLVQPGGSLRLSCAASERIFSTDVMGWYRQAPGKGLELVAVVSARGTTNYLDSVKGRFTISRDNSKNTLYLQMNSLRAEDTAVYYCYVRETTSPWRIYWGQGTLVTVSSAAAYPYDVPDYGSHHHHHH

SEQ ID NO: 249 - protein, 137 aa, Artificial Sequence
  Description of Artificial Sequence: Synthetic polypeptide
EVQLLESGGGLVQPGGSLRLSCATSGTIFSGYTMGWYRQAPGKQRELVAVISGGGDTNYADSVKGRFTISRDNSKDTMYLQMNSLRAEDTAVYYCYSREVTPPWKLYWGQGTLVTVSSAAAYPYDVPDYGSHHHHHH

SEQ ID NO: 250 - protein, 137 aa, Artificial Sequence
  Description of Artificial Sequence: Synthetic polypeptide
EVQLLESGGGLVQPGGSLRLSCATSGTIFSGYTMGWYRQAPGKGLELVAVISGGGDTNYADSVKGRFTISRDNSKDTMYLQMNSLRAEDTAVYYCYSREVTPPWKLYWGQGTLVTVSSAAAYPYDVPDYGSHHHHHH

SEQ ID NO: 251 - protein, 137 aa, Artificial Sequence
  Description of Artificial Sequence: Synthetic polypeptide
EVQLLESGGGLVQPGGSLRLSCAASGTIFSGYTMGWVRQAPGKGLEWVSVISGGGDTNYADSVKGRFTISRDNSKNTLYLQMNSLRAEDTAVYYCYSREVTPPWKLYWGQGTLVTVSSAAAYPYDVPDYGSHHHHHH

SEQ ID NO: 252 - protein, 137 aa, Artificial Sequence
  Description of Artificial Sequence: Synthetic polypeptide
QVQLLESGGGLVQPGGSLRLSCATSGTIFSGYTMGWYRQAPGKQRELVAVISGGGDTNYADSVKGRFTISRDNSKDTMYLQMNSLRAEDTAVYYCYSREVTPPWKLYWGQGTLVTVSSAAAYPYDVPDYGSHHHHHH

SEQ ID NO: 253 - protein, 137 aa, Artificial Sequence
  Description of Artificial Sequence: Synthetic polypeptide
EVQLLESGGGLVQPGGSLRLSCATSGTIFSGYTMGWYRQAPGKQRELVAVISGGGDTNYADSVKGRFTISRDNSKNTMYLQMNSLRAEDTAVYYCYSREVTPPWKLYWGQGTLVTVSSAAAYPYDVPDYGSHHHHHH

SEQ ID NO: 254 - protein, 137 aa, Artificial Sequence
  Description of Artificial Sequence: Synthetic polypeptide
EVQLLESGGGLVQPGGSLRLSCATSGTIFSGYTMGWYRQAPGKGRELVAVISGGGDTNYADSVKGRFTISRDNSKNTMYLQMNSLRAEDTAVYYCYSREVTPPWKLYWGQGTLVTVSSAAAYPYDVPDYGSHHHHHH

SEQ ID NO: 255 - protein, 137 aa, Artificial Sequence
  Description of Artificial Sequence: Synthetic polypeptide
QVQLLESGGGLVQTGGSLRLSCATSGTIFSGYTMGWYRQAPGKQRELVAVISGGGDTNYADSVKGRFTISRDNSKDTMYLQMNSLRAEDTAVYYCYSREVTPPWKLYWGQGTLVTVSSAAAYPYDVPDYGSHHHHHH

SEQ ID NO: 256 - protein, 137 aa, Artificial Sequence
  Description of Artificial Sequence: Synthetic polypeptide
EVQLLESGGGLVQPGGSLRLSCATSGTIFSGYTMGWYRQAPGKGLELVAVISGGGDTNYADSVKGRFTISRDNSKNTMYLQMNSLRAEDTAVYYCYSREVTPPWKLYWGQGTLVTVSSAAAYPYDVPDYGSHHHHHH

SEQ ID NO: 257 - protein, 245 aa, Artificial Sequence
  Description of Artificial Sequence: Synthetic polypeptide
EVQLVESGGGLVQPGGSLRLSCAASGFTFSSYTLAWVRQAPGKGLEWVAAIDSSSYTYSPDTVRGRFTISRDNAKNSLYLQMNSLRAEDTAVYYCARDSNWDALDYWGQGTTVTVSSGGGGSGGGGSGGGGSDIQMTQSPSSLSASVGDRVTITCKAREKLWSAVAWYQQKPGKAPKALIYSASFRYSGVPSRFSGSGSGTDFTLTISSLQPEDFATYYCQQYYTYPYTFGGGTKVEIKHHHHHH

SEQ ID NO: 258 - protein, 245 aa, Artificial Sequence
  Description of Artificial Sequence: Synthetic polypeptide
EVQLVESGGGLVQPGGSLRLSCAASGFTFSSYTLAWVRQAPGKGLEWVAAIDSSSYTYSPDTVRGRFTISRDNAKNSLYLQMNSLRAEDTAVYYCARDSNWDALDYWGQGTTVTVSSGGGGSGGGGSGGGGSDIQMTQSPSSLSASVGDRVTITCKAREKLWSAVAWYQQKPGKAPKSLIYSASFRYSGVPSRFSGSGSGTDFTLTISSLQPEDFATYYCQQYYTYPYTFGGGTKVEIKHHHHHH

SEQ ID NO: 259 - protein, 245 aa, Artificial Sequence
  Description of Artificial Sequence: Synthetic polypeptide
EVQLVESGGGLVQPGGSLRLSCAASGFTFSSYTLAWVRQAPGKGLEWVAAIDSSSYTYSPDTVRGRFTISRDNAKNSLYLQMNSLRAEDTAVYYCARDSNWDALDYWGQGTTVTVSSGGGGSGGGGSGGGGSDIQMTQSPSSLSASVGDRVTITCKVTEKVWGNVAWYQQKPGKAPISLIYSPSLRKSGVPSRFSGSGSGTDFTLTISSLQPEDFATYYCQQYYTYPYTFGGGTKVEIKHHHHHH

SEQ ID NO: 260 - protein, 245 aa, Artificial Sequence
  Description of Artificial Sequence: Synthetic polypeptide
EVQLVESGGGLVQPGGSLRLSCAASGFTFSSYTLAWVRQAPGKGLEWVAAIDSSSYTYSPDTVRGRFTISRDNAKNSLYLQMNSLRAEDTAVYYCARDSNWDALDYWGQGTTVTVSSGGGGSGGGGSGGGGSDIQMTQSPSSLSASVGDRVTITCKSSEKLWANVAWYQQKPGKAPKALIYSASFRYSGVPSRFSGSGSGTDFTLTISSLQPEDFATYYCQQYYTYPYTFGGGTKVEIKHHHHHH

SEQ ID NO: 261 - protein, 245 aa, Artificial Sequence
  Description of Artificial Sequence: Synthetic polypeptide
EVQLVESGGGLVQPGGSLRLSCAASGFTFSSYTLAWVRQAPGKGLEWVAAIDSSSYTYSPDTVRGRFTISRDNAKNSLYLQMNSLRAEDTAVYYCARDSNWDALDYWGQGTTVTVSSGGGGSGGGGSGGGGSDIQMTQSPSSLSASVGDRVTITCKSSEKLWANVAWYQQKPGKAPKSLIYSASFRYSGVPSRFSGSGSGTDFTLTISSLQPEDFATYYCQQYYTYPYTFGGGTKVEIKHHHHHH

SEQ ID NO: 262 - protein, 214 aa, Artificial Sequence
  Description of Artificial Sequence: Synthetic polypeptide
DIQMTQSPSSLSASVGDRVTITCKASQNVGTNVGWYQQKPGKAPKALIYSASFRYSGVPSRFSGSGSGTDFTLTISSLQPEDFATYYCQQYYTYPYTFGGGTKVEIKRTVAAPSVFIFPPSDEQLKSGTASVVCLLNNFYPREAKVQWKVDNALQSGNSQESVTEQDSKDSTYSLSSTLTLSKADYEKHKVYACEVTHQGLSSPVTKSFNRGEC

SEQ ID NO: 263 - protein, 214 aa, Artificial Sequence
  Description of Artificial Sequence: Synthetic polypeptide
DIQMTQSPSSLSASVGDRVTITCKAREKLWSAVAWYQQKPGKAPKSLIYSASFRYSGVPSRFSGSGSGTDFTLTISSLQPEDFATYYCQQYYTYPYTFGGGTKVEIKRTVAAPSVFIFPPSDEQLKSGTASVVCLLNNFYPREAKVQWKVDNALQSGNSQESVTEQDSKDSTYSLSSTLTLSKADYEKHKVYACEVTHQGLSSPVTKSFNRGEC

SEQ ID NO: 264 - protein, 214 aa, Artificial Sequence
  Description of Artificial Sequence: Synthetic polypeptide
DIQMTQSPSSLSASVGDRVTITCKVTEKVWGNVAWYQQKPGKAPISLIYSPSLRKSGVPSRFSGSGSGTDFTLTISSLQPEDFATYYCQQYYTYPYTFGGGTKVEIKRTVAAPSVFIFPPSDEQLKSGTASVVCLLNNFYPREAKVQWKVDNALQSGNSQESVTEQDSKDSTYSLSSTLTLSKADYEKHKVYACEVTHQGLSSPVTKSFNRGEC

SEQ ID NO: 265 - protein, 363 aa, Artificial Sequence
  Description of Artificial Sequence: Synthetic polypeptide
DIQMTQSPSSLSASVGDRVTITCKAREKLWSAVAWYQQKPGKAPKSLIYSASFRYSGVPSRFSGSGSGTDFTLTISSLQPEDFATYYCQQYYTYPYTFGGGTKVEIKRTVAAPSVFIFPPSDEQLKSGTASVVCLLNNFYPREAKVQWKVDNALQSGNSQESVTEQDSKDSTYSLSSTLTLSKADYEKHKVYACEVTHQGLSSPVTKSFNRGECGGGGSGGGGSGGGGSGGGGSGGGGSGGGGSEVQLLESGGGLVQPGGSLRLSCAASGSIFSANAMGWYRQAPGKQRELVAVISSGGSTNYADSVKGRFTISRDNSKNTVYLQMNSLRAEDTAVYYCMYSGSYYYTPNDYWGQGTLVTVSS

SEQ ID NO: 266 - protein, 363 aa, Artificial Sequence
  Description of Artificial Sequence: Synthetic polypeptide
DIQMTQSPSSLSASVGDRVTITCKAREKLWSAVAWYQQKPGKAPKSLIYSASFRYSGVPSRFSGSGSGTDFTLTISSLQPEDFATYYCQQYYTYPYTFGGGTKVEIKRTVAAPSVFIFPPSDEQLKSGTASVVCLLNNFYPREAKVQWKVDNALQSGNSQESVTEQDSKDSTYSLSSTLTLSKADYEKHKVYACEVTHQGLSSPVTKSFNRGECGGGGSGGGGSGGGGSGGGGSGGGGSGGGGSEVQLLESGGGLVQPGGSLRLSCAASGSIFSANAMGWYRQAPGKGLELVAVISSGGSTNYADSVKGRFTISRDNSKNTVYLQMNSLRAEDTAVYYCMYSGSYYYTPNDYWGQGTLVTVSS

SEQ ID NO: 267 - protein, 363 aa, Artificial Sequence
  Description of Artificial Sequence: Synthetic polypeptide
DIQMTQSPSSLSASVGDRVTITCKVTEKVWGNVAWYQQKPGKAPISLIYSPSLRKSGVPSRFSGSGSGTDFTLTISSLQPEDFATYYCQQYYTYPYTFGGGTKVEIKRTVAAPSVFIFPPSDEQLKSGTASVVCLLNNFYPREAKVQWKVDNALQSGNSQESVTEQDSKDSTYSLSSTLTLSKADYEKHKVYACEVTHQGLSSPVTKSFNRGECGGGGSGGGGSGGGGSGGGGSGGGGSGGGGSEVQLLESGGGLVQPGGSLRLSCAASGSIFSANAMGWYRQAPGKQRELVAVISSGGSTNYADSVKGRFTISRDNSKNTVYLQMNSLRAEDTAVYYCMYSGSYYYTPNDYWGQGTLVTVSS

SEQ ID NO: 268 - protein, 363 aa, Artificial Sequence
  Description of Artificial Sequence: Synthetic polypeptide
DIQMTQSPSSLSASVGDRVTITCKVTEKVWGNVAWYQQKPGKAPISLIYSPSLRKSGVPSRFSGSGSGTDFTLTISSLQPEDFATYYCQQYYTYPYTFGGGTKVEIKRTVAAPSVFIFPPSDEQLKSGTASVVCLLNNFYPREAKVQWKVDNALQSGNSQESVTEQDSKDSTYSLSSTLTLSKADYEKHKVYACEVTHQGLSSPVTKSFNRGECGGGGSGGGGSGGGGSGGGGSGGGGSGGGGSEVQLLESGGGLVQPGGSLRLSCAASGSIFSANAMGWYRQAPGKGLELVAVISSGGSTNYADSVKGRFTISRDNSKNTVYLQMNSLRAEDTAVYYCMYSGSYYYTPNDYWGQGTLVTVSS

SEQ ID NO: 269 - protein, 214 aa, Artificial Sequence
  Description of Artificial Sequence: Synthetic polypeptide
DIQMTQSPSSLSASVGDRVTITCKSSEKLWANVAWYQQKPGKAPKSLIYSASFRYSGVPSRFSGSGSGTDFTLTISSLQPEDFATYYCQQYYTYPYTFGGGTKVEIKRTVAAPSVFIFPPSDEQLKSGTASVVCLLNNFYPREAKVQWKVDNALQSGNSQESVTEQDSKDSTYSLSSTLTLSKADYEKHKVYACEVTHQGLSSPVTKSFNRGEC

SEQ ID NO: 270 - protein, 214 aa, Artificial Sequence
  Description of Artificial Sequence: Synthetic polypeptide
DIQMTQSPSSLSASVGDRVTITCKSSEKLWANVAWYQQKPGKAPKLLIYSASFRYSGVPSRFSGSGSGTDFTLTISSLQPEDFATYYCQQYYTYPYTFGGGTKVEIKRTVAAPSVFIFPPSDEQLKSGTASVVCLLNNFYPREAKVQWKVDNALQSGNSQESVTEQDSKDSTYSLSSTLTLSKADYEKHKVYACEVTHQGLSSPVTKSFNRGEC

SEQ ID NO: 271 - protein, 214 aa, Artificial Sequence
  Description of Artificial Sequence: Synthetic polypeptide
DIQMTQSPSSLSASVGDRVTITCKAREKLWSAVAWYQQKPGKAPKLLIYSASFRYSGVPSRFSGSGSGTDFTLTISSLQPEDFATYYCQQYYTYPYTFGGGTKVEIKRTVAAPSVFIFPPSDEQLKSGTASVVCLLNNFYPREAKVQWKVDNALQSGNSQESVTEQDSKDSTYSLSSTLTLSKADYEKHKVYACEVTHQGLSSPVTKSFNRGEC

SEQ ID NO: 272 - protein, 547 aa, Artificial Sequence
  Description of Artificial Sequence: Synthetic polypeptide
APTSSSTKKTQLQLEHLLLDLQMILNGINNYKNPKLTRMLTFKFYMPKKATELKHLQCLEEELKPLEEVLNLAQSKNFHLRPRDLISNINVIVLELKGSETTFMCEYADETATIVEFLNRWITFCQSIISTLTSGGPGPAGLYAQPGSEVQLVESGGGLVQPGNSLRLSCAASGFTFSKFGMSWVRQAPGKGLEWVSSISGSGRDTLYAESVKGRFTISRDNAKTTLYLQMNSLRPEDTAVYYCTIGGSLSVSSQGTLVTVSSGGGGSGGGGSGGGGSGGGGSGGGGSGGGGSSGGPGPAGLYAQPGSEVQLVESGGGLVQPGGSLRLSCAASGFTFSSYTLAWVRQAPGKGLEWVAAIDSSSYTYSPDTVRGRFTISRDNAKNSLYLQMNSLRAEDTAVYYCARDSNWDALDYWGQGTTVTVSSGGGGSGGGGSGGGGSDIQMTQSPSSLSASVGDRVTITCKSSEKLWANVAWYQQKPGKAPKALIYSASFRYSGVPSRFSGSGSGTDFTLTISSLQPEDFATYYCQQYYTYPYTFGGGTKVEIK

SEQ ID NO: 273 - protein, 547 aa, Artificial Sequence
  Description of Artificial Sequence: Synthetic polypeptide
APTSSSTKKTQLQLEHLLLDLQMILNGINNYKNPKLTRMLTFKFYMPKKATELKHLQCLEEELKPLEEVLNLAQSKNFHLRPRDLISNINVIVLELKGSETTFMCEYADETATIVEFLNRWITFCQSIISTLTSGGPGPAGLYAQPGSEVQLVESGGGLVQPGNSLRLSCAASGFTFSKFGMSWVRQAPGKGLEWVSSISGSGRDTLYAESVKGRFTISRDNAKTTLYLQMNSLRPEDTAVYYCTIGGSLSVSSQGTLVTVSSGGGGSGGGGSGGGGSGGGGSGGGGSGGGGSSGGPGPAGLYAQPGSEVQLVESGGGLVQPGGSLRLSCAASGFTFSSYTLAWVRQAPGKGLEWVAAIDSSSYTYSPDTVRGRFTISRDNAKNSLYLQMNSLRAEDTAVYYCARDSNWDALDYWGQGTTVTVSSGGGGSGGGGSGGGGSDIQMTQSPSSLSASVGDRVTITCKSSEKLWANVAWYQQKPGKAPKSLIYSASFRYSGVPSRFSGSGSGTDFTLTISSLQPEDFATYYCQQYYTYPYTFGGGTKVEIK

SEQ ID NO: 274 - protein, 547 aa, Artificial Sequence
  Description of Artificial Sequence: Synthetic polypeptide
APTSSSTKKTQLQLEHLLLDLQMILNGINNYKNPKLTRMLTFKFYMPKKATELKHLQCLEEELKPLEEVLNLAQSKNFHLRPRDLISNINVIVLELKGSETTFMCEYADETATIVEFLNRWITFCQSIISTLTSGGPGPAGLYAQPGSEVQLVESGGGLVQPGNSLRLSCAASGFTFSKFGMSWVRQAPGKGLEWVSSISGSGRDTLYAESVKGRFTISRDNAKTTLYLQMNSLRPEDTAVYYCTIGGSLSVSSQGTLVTVSSGGGGSGGGGSGGGGSGGGGSGGGGSGGGGSSGGPGPAGLYAQPGSEVQLVESGGGLVQPGGSLRLSCAASGFTFSSYTLAWVRQAPGKGLEWVAAIDSSSYTYSPDTVRGRFTISRDNAKNSLYLQMNSLRAEDTAVYYCARDSNWDALDYWGQGTTVTVSSGGGGSGGGGSGGGGSDIQMTQSPSSLSASVGDRVTITCKSSEKLWANVAWYQQKPGKAPKLLIYSASFRYSGVPSRFSGSGSGTDFTLTISSLQPEDFATYYCQQYYTYPYTFGGGTKVEIK

SEQ ID NO: 275 - protein, 547 aa, Artificial Sequence
  Description of Artificial Sequence: Synthetic polypeptide
APTSSSTKKTQLQLEHLLLDLQMILNGINNYKNPKLTRMLTFKFYMPKKATELKHLQCLEEELKPLEEVLNLAQSKNFHLRPRDLISNINVIVLELKGSETTFMCEYADETATIVEFLNRWITFCQSIISTLTSGGPGPAGLYAQPGSEVQLVESGGGLVQPGNSLRLSCAASGFTFSKFGMSWVRQAPGKGLEWVSSISGSGRDTLYAESVKGRFTISRDNAKTTLYLQMNSLRPEDTAVYYCTIGGSLSVSSQGTLVTVSSGGGGSGGGGSGGGGSGGGGSGGGGSGGGGSSGGPGPAGLYAQPGSEVQLVESGGGLVQPGGSLRLSCAASGFTFSSYTLAWVRQAPGKCLEWVAAIDSSSYTYSPDTVRGRFTISRDNAKNSLYLQMNSLRAEDTAVYYCARDSNWDALDYWGQGTTVTVSSGGGGSGGGGSGGGGSDIQMTQSPSSLSASVGDRVTITCKSSEKLWANVAWYQQKPGKAPKSLIYSASFRYSGVPSRFSGSGSGTDFTLTISSLQPEDFATYYCQQYYTYPYTFGCGTKVEIK

SEQ ID NO: 276 - protein, 547 aa, Artificial Sequence
  Description of Artificial Sequence: Synthetic polypeptide
APTSSSTKKTQLQLEHLLLDLQMILNGINNYKNPKLTRMLTFKFYMPKKATELKHLQCLEEELKPLEEVLNLAQSKNFHLRPRDLISNINVIVLELKGSETTFMCEYADETATIVEFLNRWITFCQSIISTLTSGGPGPAGLYAQPGSEVQLVESGGGLVQPGNSLRLSCAASGFTFSKFGMSWVRQAPGKGLEWVSSISGSGRDTLYAESVKGRFTISRDNAKTTLYLQMNSLRPEDTAVYYCTIGGSLSVSSQGTLVTVSSGGGGSGGGGSGGGGSGGGGSGGGGSGGGGSSGGPGPAGLYAQPGSEVQLVESGGGLVQPGGSLRLSCAASGFTFSSYTLAWVRQAPGKCLEWVAAIDSSSYTYSPDTVRGRFTISRDNAKNSLYLQMNSLRAEDTAVYYCARDSNWDALDYWGQGTTVTVSSGGGGSGGGGSGGGGSDIQMTQSPSSLSASVGDRVTITCKSSEKLWANVAWYQQKPGKAPKLLIYSASFRYSGVPSRFSGSGSGTDFTLTISSLQPEDFATYYCQQYYTYPYTFGCGTKVEIK

SEQ ID NO: 277 - protein, 547 aa, Artificial Sequence
  Description of Artificial Sequence: Synthetic polypeptide
APTSSSTKKTQLQLEHLLLDLQMILNGINNYKNPKLTRMLTFKFYMPKKATELKHLQCLEEELKPLEEVLNLAQSKNFHLRPRDLISNINVIVLELKGSETTFMCEYADETATIVEFLNRWITFCQSIISTLTSGGPGPAGLYAQPGSEVQLVESGGGLVQPGNSLRLSCAASGFTFSKFGMSWVRQAPGKGLEWVSSISGSGRDTLYAESVKGRFTISRDNAKTTLYLQMNSLRPEDTAVYYCTIGGSLSVSSQGTLVTVSSGGGGSGGGGSGGGGSGGGGSGGGGSGGGGSSGGPGPAGLYAQPGSEVQLVESGGGLVQPGGSLRLSCAASGFTFSSYTLAWVRQAPGKGLEWVAAIDSSSYTYSPDTVRGRFTISRDNAKNSLYLQMNSLRAEDTAVYYCARDSNWDALDYWGCGTTVTVSSGGGGSGGGGSGGGGSDIQMTQSPSSLSASVGDRVTITCKSSEKLWANVAWYQQKPGKCPKALIYSASFRYSGVPSRFSGSGSGTDFTLTISSLQPEDFATYYCQQYYTYPYTFGGGTKVEIK

SEQ ID NO: 278 - protein, 547 aa, Artificial Sequence
  Description of Artificial Sequence: Synthetic polypeptide
APTSSSTKKTQLQLEHLLLDLQMILNGINNYKNPKLTRMLTFKFYMPKKATELKHLQCLEEELKPLEEVLNLAQSKNFHLRPRDLISNINVIVLELKGSETTFMCEYADETATIVEFLNRWITFCQSIISTLTSGGPGPAGLYAQPGSEVQLVESGGGLVQPGNSLRLSCAASGFTFSKFGMSWVRQAPGKGLEWVSSISGSGRDTLYAESVKGRFTISRDNAKTTLYLQMNSLRPEDTAVYYCTIGGSLSVSSQGTLVTVSSGGGGSGGGGSGGGGSGGGGSGGGGSGGGGSSGGPGPAGLYAQPGSEVQLVESGGGLVQPGGSLRLSCAASGFTFSSYTLAWVRQAPGKGLEWVAAIDSSSYTYSPDTVRGRFTISRDNAKNSLYLQMNSLRAEDTAVYYCARDSNWDALDYWGQGTTVTVSSSGGPGPAGLYAQPGSDIQMTQSPSSLSASVGDRVTITCKAREKLWSAVAWYQQKPGKAPKLLIYSASFRYSGVPSRFSGSGSGTDFTLTISSLQPEDFATYYCQQYYTYPYTFGGGTKVEIK

SEQ ID NO: 279 - protein, 547 aa, Artificial Sequence
  Description of Artificial Sequence: Synthetic polypeptide
APTSSSTKKTQLQLEHLLLDLQMILNGINNYKNPKLTRMLTFKFYMPKKATELKHLQCLEEELKPLEEVLNLAQSKNFHLRPRDLISNINVIVLELKGSETTFMCEYADETATIVEFLNRWITFCQSIISTLTSGGPGPAGLYAQPGSEVQLVESGGGLVQPGNSLRLSCAASGFTFSKFGMSWVRQAPGKGLEWVSSISGSGRDTLYAESVKGRFTISRDNAKTTLYLQMNSLRPEDTAVYYCTIGGSLSVSSQGTLVTVSSGGGGSGGGGSGGGGSGGGGSGGGGSGGGGSSGGPGPAGLYAQPGSEVQLVESGGGLVQPGGSLRLSCAASGFTFSSYTLAWVRQAPGKGLEWVAAIDSSSYTYSPDTVRGRFTISRDNAKNSLYLQMNSLRAEDTAVYYCARDSNWDALDYWGQGTTVTVSSGGGGSGGGGSGGGGSDIQMTQSPSSLSASVGDRVTITCKAREKLWSAVAWYQQKPGKAPKLLIYSASFRYSGVPSRFSGSGSGTDFTLTISSLQPEDFATYYCQQYYTYPYTFGGGTKVEIK

SEQ ID NO: 280 - protein, 547 aa, Artificial Sequence
  Description of Artificial Sequence: Synthetic polypeptide
APTSSSTKKTQLQLEHLLLDLQMILNGINNYKNPKLTRMLTFKFYMPKKATELKHLQCLEEELKPLEEVLNLAQSKNFHLRPRDLISNINVIVLELKGSETTFMCEYADETATIVEFLNRWITFCQSIISTLTSGGPGPAGLYAQPGSEVQLVESGGGLVQPGNSLRLSCAASGFTFSKFGMSWVRQAPGKGLEWVSSISGSGRDTLYAESVKGRFTISRDNAKTTLYLQMNSLRPEDTAVYYCTIGGSLSVSSQGTLVTVSSGGGGSGGGGSGGGGSGGGGSGGGGSGGGGSSGGPGPAGLYAQPGSEVQLVESGGGLVQPGGSLRLSCAASGFTFSSYTLAWVRQAPGKCLEWVAAIDSSSYTYSPDTVRGRFTISRDNAKNSLYLQMNSLRAEDTAVYYCARDSNWDALDYWGQGTTVTVSSGGGGSGGGGSGGGGSDIQMTQSPSSLSASVGDRVTITCKAREKLWSAVAWYQQKPGKAPKLLIYSASFRYSGVPSRFSGSGSGTDFTLTISSLQPEDFATYYCQQYYTYPYTFGCGTKVEIK

SEQ ID NO: 281 - protein, 547 aa, Artificial Sequence
  Description of Artificial Sequence: Synthetic polypeptide
APTSSSTKKTQLQLEHLLLDLQMILNGINNYKNPKLTRMLTFKFYMPKKATELKHLQCLEEELKPLEEVLNLAQSKNFHLRPRDLISNINVIVLELKGSETTFMCEYADETATIVEFLNRWITFCQSIISTLTSGGPALFKSSFPPGSEVQLVESGGGLVQPGNSLRLSCAASGFTFSKFGMSWVRQAPGKGLEWVSSISGSGRDTLYAESVKGRFTISRDNAKTTLYLQMNSLRPEDTAVYYCTIGGSLSVSSQGTLVTVSSGGGGSGGGGSGGGGSGGGGSGGGGSGGGGSSGGPALFKSSFPPGSEVQLVESGGGLVQPGGSLRLSCAASGFTFSSYTLAWVRQAPGKGLEWVAAIDSSSYTYSPDTVRGRFTISRDNAKNSLYLQMNSLRAEDTAVYYCARDSNWDALDYWGQGTTVTVSSGGGGSGGGGSGGGGSDIQMTQSPSSLSASVGDRVTITCKAREKLWSAVAWYQQKPGKAPKSLIYSASFRYSGVPSRFSGSGSGTDFTLTISSLQPEDFATYYCQQYYTYPYTFGGGTKVEIK

SEQ ID NO: 282 - protein, 547 aa, Artificial Sequence
  Description of Artificial Sequence: Synthetic polypeptide
APTSSSTKKTQLQLEHLLLDLQMILNGINNYKNPKLTRMLTFKFYMPKKATELKHLQCLEEELKPLEEVLNLAQSKNFHLRPRDLISNINVIVLELKGSETTFMCEYADETATIVEFLNRWITFCQSIISTLTSGGPALFKSSFPPGSEVQLVESGGGLVQPGNSLRLSCAASGFTFSKFGMSWVRQAPGKGLEWVSSISGSGRDTLYAESVKGRFTISRDNAKTTLYLQMNSLRPEDTAVYYCTIGGSLSVSSQGTLVTVSSGGGGSGGGGSGGGGSGGGGSGGGGSGGGGSSGGPALFKSSFPPGSEVQLVESGGGLVQPGGSLRLSCAASGFTFSSYTLAWVRQAPGKGLEWVAAIDSSSYTYSPDTVRGRFTISRDNAKNSLYLQMNSLRAEDTAVYYCARDSNWDALDYWGQGTTVTVSSGGGGSGGGGSGGGGSDIQMTQSPSSLSASVGDRVTITCKVTEKVWGNVAWYQQKPGKAPISLIYSPSLRKSGVPSRFSGSGSGTDFTLTISSLQPEDFATYYCQQYYTYPYTFGGGTKVEIK

SEQ ID NO: 283 - protein, 547 aa, Artificial Sequence
  Description of Artificial Sequence: Synthetic polypeptide
APTSSSTKKTQLQLEHLLLDLQMILNGINNYKNPKLTRMLTFKFYMPKKATELKHLQCLEEELKPLEEVLNLAQSKNFHLRPRDLISNINVIVLELKGSETTFMCEYADETATIVEFLNRWITFCQSIISTLTSGGPALFKSSFPPGSEVQLVESGGGLVQPGNSLRLSCAASGFTFSKFGMSWVRQAPGKGLEWVSSISGSGRDTLYAESVKGRFTISRDNAKTTLYLQMNSLRPEDTAVYYCTIGGSLSVSSQGTLVTVSSGGGGSGGGGSGGGGSGGGGSGGGGSGGGGSSGGPALFKSSFPPGSEVQLVESGGGLVQPGGSLRLSCAASGFTFSSYTLAWVRQAPGKCLEWVAAIDSSSYTYSPDTVRGRFTISRDNAKNSLYLQMNSLRAEDTAVYYCARDSNWDALDYWGQGTTVTVSSGGGGSGGGGSGGGGSDIQMTQSPSSLSASVGDRVTITCKAREKLWSAVAWYQQKPGKAPKSLIYSASFRYSGVPSRFSGSGSGTDFTLTISSLQPEDFATYYCQQYYTYPYTFGCGTKVEIK

SEQ ID NO: 284 - protein, 547 aa, Artificial Sequence
  Description of Artificial Sequence: Synthetic polypeptide
APTSSSTKKTQLQLEHLLLDLQMILNGINNYKNPKLTRMLTFKFYMPKKATELKHLQCLEEELKPLEEVLNLAQSKNFHLRPRDLISNINVIVLELKGSETTFMCEYADETATIVEFLNRWITFCQSIISTLTSGGPALFKSSFPPGSEVQLVESGGGLVQPGNSLRLSCAASGFTFSKFGMSWVRQAPGKGLEWVSSISGSGRDTLYAESVKGRFTISRDNAKTTLYLQMNSLRPEDTAVYYCTIGGSLSVSSQGTLVTVSSGGGGSGGGGSGGGGSGGGGSGGGGSGGGGSSGGPALFKSSFPPGSEVQLVESGGGLVQPGGSLRLSCAASGFTFSSYTLAWVRQAPGKGLEWVAAIDSSSYTYSPDTVRGRFTISRDNAKNSLYLQMNSLRAEDTAVYYCARDSNWDALDYWGCGTTVTVSSGGGGSGGGGSGGGGSDIQMTQSPSSLSASVGDRVTITCKAREKLWSAVAWYQQKPGKCPKALIYSASFRYSGVPSRFSGSGSGTDFTLTISSLQPEDFATYYCQQYYTYPYTFGGGTKVEIK

SEQ ID NO: 285 - protein, 547 aa, Artificial Sequence
  Description of Artificial Sequence: Synthetic polypeptide
APTSSSTKKTQLQLEHLLLDLQMILNGINNYKNPKLTRMLTFKFYMPKKATELKHLQCLEEELKPLEEVLNLAQSKNFHLRPRDLISNINVIVLELKGSETTFMCEYADETATIVEFLNRWITFCQSIISTLTSGGPALFKSSFPPGSEVQLVESGGGLVQPGNSLRLSCAASGFTFSKFGMSWVRQAPGKGLEWVSSISGSGRDTLYAESVKGRFTISRDNAKTTLYLQMNSLRPEDTAVYYCTIGGSLSVSSQGTLVTVSSGGGGSGGGGSGGGGSGGGGSGGGGSGGGGSSGGPALFKSSFPPGSEVQLVESGGGLVQPGGSLRLSCAASGFTFSSYTLAWVRQAPGKCLEWVAAIDSSSYTYSPDTVRGRFTISRDNAKNSLYLQMNSLRAEDTAVYYCARDSNWDALDYWGQGTTVTVSSGGGGSGGGGSGGGGSDIQMTQSPSSLSASVGDRVTITCKVTEKVWGNVAWYQQKPGKAPISLIYSPSLRKSGVPSRFSGSGSGTDFTLTISSLQPEDFATYYCQQYYTYPYTFGCGTKVEIK

SEQ ID NO: 286 - protein, 528 aa, Artificial Sequence
  Description of Artificial Sequence: Synthetic polypeptide
APTSSSTKKTQLQLEHLLLDLQMILNGINNYKNPKLTRMLTFKFYMPKKATELKHLQCLEEELKPLEEVLNLAQSKNFHLRPRDLISNINVIVLELKGSETTFMCEYADETATIVEFLNRWITFCQSIISTLTSGGPALFKSSFPPGSEVQLVESGGGLVQPGNSLRLSCAASGFTFSKFGMSWVRQAPGKGLEWVSSISGSGRDTLYAESVKGRFTISRDNAKTTLYLQMNSLRPEDTAVYYCTIGGSLSVSSQGTLVTVSSGGGGSGGGGSGGGGSGGGGSGGGGSGGGGSSGGPALFKSSFPPGSEVQLVESGGGLVQPGGSLRLSCAASGFTFSSYTLAWVRQAPGKGLEWVAAIDSSSYTYSPDTVRGRFTISRDNAKNSLYLQMNSLRAEDTAVYYCARDSNWDALDYWGQGTTVTVSSASTKGPSVFPLAPSSKSTSGGTAALGCLVKDYFPEPVTVSWNSGALTSGVHTFPAVLQSSGLYSLSSVVTVPSSSLGTQTYICNVNHKPSNTKVDKRVEPKSC

SEQ ID NO: 287 - protein, 642 aa, Artificial Sequence
  Description of Artificial Sequence: Synthetic polypeptide
ESKYGPPCPPCPAPEFLGGPSVFLFPPKPKDTLMISRTPEVTCVVVDVSQEDPEVQFNWYVDGVEVHNAKTKPREEQFNSTYRVVSVLTVLHQDWLNGKEYKCKVSNKGLPSSIEKTISKAKGQPREPQVYTLPPSQEEMTKNQVSLTCLVKGFYPSDIAVEWESNGQPENNYKTTPPVLDSDGSFFLYSRLTVDKSRWQEGNVFSCSVMHEALHNHYTQKSLSLSLGKSGGPALFKSSFPPGSAPTSSSTKKTQLQLEHLLLDLQMILNGINNYKNPKLTRMLTFKFYMPKKATELKHLQCLEEELKPLEEVLNLAQSKNFHLRPRDLISNINVIVLELKGSETTFMCEYADETATIVEFLNRWITFCQSIISTLTGGGGSGGGGSGGGGSGGGGSGGGGSGGGGSSGGPALFKSSFPPGSEVQLVESGGGLVQPGGSLRLSCAASGFTFSSYTLAWVRQAPGKGLEWVAAIDSSSYTYSPDTVRGRFTISRDNAKNSLYLQMNSLRAEDTAVYYCARDSNWDALDYWGQGTTVTVSSASTKGPSVFPLAPSSKSTSGGTAALGCLVKDYFPEPVTVSWNSGALTSGVHTFPAVLQSSGLYSLSSVVTVPSSSLGTQTYICNVNHKPSNTKVDKRVEPKSC

SEQ ID NO: 288 - protein, 661 aa, Artificial Sequence
  Description of Artificial Sequence: Synthetic polypeptide
ESKYGPPCPPCPAPEFLGGPSVFLFPPKPKDTLMISRTPEVTCVVVDVSQEDPEVQFNWYVDGVEVHNAKTKPREEQFNSTYRVVSVLTVLHQDWLNGKEYKCKVSNKGLPSSIEKTISKAKGQPREPQVYTLPPSQEEMTKNQVSLTCLVKGFYPSDIAVEWESNGQPENNYKTTPPVLDSDGSFFLYSRLTVDKSRWQEGNVFSCSVMHEALHNHYTQKSLSLSLGKSGGPALFKSSFPPGSAPTSSSTKKTQLQLEHLLLDLQMILNGINNYKNPKLTRMLTFKFYMPKKATELKHLQCLEEELKPLEEVLNLAQSKNFHLRPRDLISNINVIVLELKGSETTFMCEYADETATIVEFLNRWITFCQSIISTLTGGGGSGGGGSGGGGSGGGGSGGGGSGGGGSSGGPALFKSSFPPGSEVQLVESGGGLVQPGGSLRLSCAASGFTFSSYTLAWVRQAPGKGLEWVAAIDSSSYTYSPDTVRGRFTISRDNAKNSLYLQMNSLRAEDTAVYYCARDSNWDALDYWGQGTTVTVSSGGGGSGGGGSGGGGSDIQMTQSPSSLSASVGDRVTITCKAREKLWSAVAWYQQKPGKAPKSLIYSASFRYSGVPSRFSGSGSGTDFTLTISSLQPEDFATYYCQQYYTYPYTFGGGTKVEIK

SEQ ID NO: 289 - protein, 661 aa, Artificial Sequence
  Description of Artificial Sequence: Synthetic polypeptide
ESKYGPPCPPCPAPEFLGGPSVFLFPPKPKDTLMISRTPEVTCVVVDVSQEDPEVQFNWYVDGVEVHNAKTKPREEQFNSTYRVVSVLTVLHQDWLNGKEYKCKVSNKGLPSSIEKTISKAKGQPREPQVYTLPPSQEEMTKNQVSLTCLVKGFYPSDIAVEWESNGQPENNYKTTPPVLDSDGSFFLYSRLTVDKSRWQEGNVFSCSVMHEALHNHYTQKSLSLSLGKSGGPALFKSSFPPGSAPTSSSTKKTQLQLEHLLLDLQMILNGINNYKNPKLTRMLTFKFYMPKKATELKHLQCLEEELKPLEEVLNLAQSKNFHLRPRDLISNINVIVLELKGSETTFMCEYADETATIVEFLNRWITFCQSIISTLTGGGGSGGGGSGGGGSGGGGSGGGGSGGGGSSGGPALFKSSFPPGSEVQLVESGGGLVQPGGSLRLSCAASGFTFSSYTLAWVRQAPGKGLEWVAAIDSSSYTYSPDTVRGRFTISRDNAKNSLYLQMNSLRAEDTAVYYCARDSNWDALDYWGQGTTVTVSSGGGGSGGGGSGGGGSDIQMTQSPSSLSASVGDRVTITCKVTEKVWGNVAWYQQKPGKAPISLIYSPSLRKSGVPSRFSGSGSGTDFTLTISSLQPEDFATYYCQQYYTYPYTFGGGTKVEIK

SEQ ID NO: 290 - protein, 661 aa, Artificial Sequence
  Description of Artificial Sequence: Synthetic polypeptide
ESKYGPPCPPCPAPEFLGGPSVFLFPPKPKDTLMISRTPEVTCVVVDVSQEDPEVQFNWYVDGVEVHNAKTKPREEQFNSTYRVVSVLTVLHQDWLNGKEYKCKVSNKGLPSSIEKTISKAKGQPREPQVYTLPPSQEEMTKNQVSLTCLVKGFYPSDIAVEWESNGQPENNYKTTPPVLDSDGSFFLYSRLTVDKSRWQEGNVFSCSVMHEALHNHYTQKSLSLSLGKSGGPALFKSSFPPGSAPTSSSTKKTQLQLEHLLLDLQMILNGINNYKNPKLTRMLTFKFYMPKKATELKHLQCLEEELKPLEEVLNLAQSKNFHLRPRDLISNINVIVLELKGSETTFMCEYADETATIVEFLNRWITFCQSIISTLTGGGGSGGGGSGGGGSGGGGSGGGGSGGGGSSGGPALFKSSFPPGSEVQLVESGGGLVQPGGSLRLSCAASGFTFSSYTLAWVRQAPGKCLEWVAAIDSSSYTYSPDTVRGRFTISRDNAKNSLYLQMNSLRAEDTAVYYCARDSNWDALDYWGQGTTVTVSSGGGGSGGGGSGGGGSDIQMTQSPSSLSASVGDRVTITCKAREKLWSAVAWYQQKPGKAPKSLIYSASFRYSGVPSRFSGSGSGTDFTLTISSLQPEDFATYYCQQYYTYPYTFGCGTKVEIK

SEQ ID NO: 291 - protein, 661 aa, Artificial Sequence
  Description of Artificial Sequence: Synthetic polypeptide
ESKYGPPCPPCPAPEFLGGPSVFLFPPKPKDTLMISRTPEVTCVVVDVSQEDPEVQFNWYVDGVEVHNAKTKPREEQFNSTYRVVSVLTVLHQDWLNGKEYKCKVSNKGLPSSIEKTISKAKGQPREPQVYTLPPSQEEMTKNQVSLTCLVKGFYPSDIAVEWESNGQPENNYKTTPPVLDSDGSFFLYSRLTVDKSRWQEGNVFSCSVMHEALHNHYTQKSLSLSLGKSGGPALFKSSFPPGSAPTSSSTKKTQLQLEHLLLDLQMILNGINNYKNPKLTRMLTFKFYMPKKATELKHLQCLEEELKPLEEVLNLAQSKNFHLRPRDLISNINVIVLELKGSETTFMCEYADETATIVEFLNRWITFCQSIISTLTGGGGSGGGGSGGGGSGGGGSGGGGSGGGGSSGGPALFKSSFPPGSEVQLVESGGGLVQPGGSLRLSCAASGFTFSSYTLAWVRQAPGKGLEWVAAIDSSSYTYSPDTVRGRFTISRDNAKNSLYLQMNSLRAEDTAVYYCARDSNWDALDYWGCGTTVTVSSGGGGSGGGGSGGGGSDIQMTQSPSSLSASVGDRVTITCKAREKLWSAVAWYQQKPGKCPKALIYSASFRYSGVPSRFSGSGSGTDFTLTISSLQPEDFATYYCQQYYTYPYTFGGGTKVEIK

SEQ ID NO: 292 - protein, 661 aa, Artificial Sequence
  Description of Artificial Sequence: Synthetic polypeptide
ESKYGPPCPPCPAPEFLGGPSVFLFPPKPKDTLMISRTPEVTCVVVDVSQEDPEVQFNWYVDGVEVHNAKTKPREEQFNSTYRVVSVLTVLHQDWLNGKEYKCKVSNKGLPSSIEKTISKAKGQPREPQVYTLPPSQEEMTKNQVSLTCLVKGFYPSDIAVEWESNGQPENNYKTTPPVLDSDGSFFLYSRLTVDKSRWQEGNVFSCSVMHEALHNHYTQKSLSLSLGKSGGPALFKSSFPPGSAPTSSSTKKTQLQLEHLLLDLQMILNGINNYKNPKLTRMLTFKFYMPKKATELKHLQCLEEELKPLEEVLNLAQSKNFHLRPRDLISNINVIVLELKGSETTFMCEYADETATIVEFLNRWITFCQSIISTLTGGGGSGGGGSGGGGSGGGGSGGGGSGGGGSSGGPALFKSSFPPGSEVQLVESGGGLVQPGGSLRLSCAASGFTFSSYTLAWVRQAPGKCLEWVAAIDSSSYTYSPDTVRGRFTISRDNAKNSLYLQMNSLRAEDTAVYYCARDSNWDALDYWGQGTTVTVSSGGGGSGGGGSGGGGSDIQMTQSPSSLSASVGDRVTITCKVTEKVWGNVAWYQQKPGKAPISLIYSPSLRKSGVPSRFSGSGSGTDFTLTISSLQPEDFATYYCQQYYTYPYTFGCGTKVEIK

SEQ ID NO: 293 - protein, 661 aa, Artificial Sequence
  Description of Artificial Sequence: Synthetic polypeptide
ESKYGPPCPPCPAPEFLGGPSVFLFPPKPKDTLMISRTPEVTCVVVDVSQEDPEVQFNWYVDGVEVHNAKTKPREEQFNSTYRVVSVLTVLHQDWLNGKEYKCKVSNKGLPSSIEKTISKAKGQPREPQVYTLPPSQEEMTKNQVSLTCLVKGFYPSDIAVEWESNGQPENNYKTTPPVLDSDGSFFLYSRLTVDKSRWQEGNVFSCSVMHEALHNHYTQKSLSLSLGKSGGPALFKSSFPPGSAPTSSSTKKTQLQLEHLLLDLQMILNGINNYKNPKLTRMLTFKFYMPKKATELKHLQCLEEELKPLEEVLNLAQSKNFHLRPRDLISNINVIVLELKGSETTFMCEYADETATIVEFLNRWITFCQSIISTLTGGGGSGGGGSGGGGSGGGGSGGGGSGGGGSSGGPALFKSSFPPGSEVQLVESGGGLVQPGGSLRLSCAASGFTFSSYTLAWVRQAPGKGLEWVAAIDSSSYTYSPDTVRGRFTISRDNAKNSLYLQMNSLRAEDTAVYYCARDSNWDALDYWGCGTTVTVSSGGGGSGGGGSGGGGSDIQMTQSPSSLSASVGDRVTITCKVTEKVWGNVAWYQQKPGKCPISLIYSPSLRKSGVPSRFSGSGSGTDFTLTISSLQPEDFATYYCQQYYTYPYTFGGGTKVEIK

SEQ ID NO: 294 - protein, 659 aa, Artificial Sequence
  Description of Artificial Sequence: Synthetic polypeptide
VPRDCGCKPCICTVPEVSSVFIFPPKPKDVLTITLTPKVTCVVVDISKDDPEVQFSWFVDDVEVHTAQTQPREEQFNSTFRSVSELPIMHQDWLNGKEFKCRVNSAAFPAPIEKTISKTKGRPKAPQVYTIPPPKEQMAKDKVSLTCMITDFFPEDITVEWQWNGQPAENYKNTQPIMDTDGSYFVYSKLNVQKSNWEAGNTFTCSVLHEGLHNHHTEKSLSHSPGKSGGPALFKSSFPPGSAPTSSSTKKTQLQLEHLLLDLQMILNGINNYKNPKLTRMLTFKFYMPKKATELKHLQCLEEELKPLEEVLNLAQSKNFHLRPRDLISNINVIVLELKGSETTFMCEYADETATIVEFLNRWITFCQSIISTLTGGGGSGGGGSGGGGSGGGGSGGGGSGGGGSSGGPALFKSSFPPGSEVQLVESGGGLVQPGGSLRLSCAASGFTFSSYTLAWVRQAPGKGLEWVAAIDSSSYTYSPDTVRGRFTISRDNAKNSLYLQMNSLRAEDTAVYYCARDSNWDALDYWGQGTTVTVSSGGGGSGGGGSGGGGSDIQMTQSPSSLSASVGDRVTITCKAREKLWSAVAWYQQKPGKAPKSLIYSASFRYSGVPSRFSGSGSGTDFTLTISSLQPEDFATYYCQQYYTYPYTFGGGTKVEIK

SEQ ID NO: 295 - protein, 659 aa, Artificial Sequence
  Description of Artificial Sequence: Synthetic polypeptide
VPRDCGCKPCICTVPEVSSVFIFPPKPKDVLTITLTPKVTCVVVDISKDDPEVQFSWFVDDVEVHTAQTQPREEQFNSTFRSVSELPIMHQDWLNGKEFKCRVNSAAFPAPIEKTISKTKGRPKAPQVYTIPPPKEQMAKDKVSLTCMITDFFPEDITVEWQWNGQPAENYKNTQPIMDTDGSYFVYSKLNVQKSNWEAGNTFTCSVLHEGLHNHHTEKSLSHSPGKSGGPALFKSSFPPGSAPTSSSTKKTQLQLEHLLLDLQMILNGINNYKNPKLTRMLTFKFYMPKKATELKHLQCLEEELKPLEEVLNLAQSKNFHLRPRDLISNINVIVLELKGSETTFMCEYADETATIVEFLNRWITFCQSIISTLTGGGGSGGGGSGGGGSGGGGSGGGGSGGGGSSGGPALFKSSFPPGSEVQLVESGGGLVQPGGSLRLSCAASGFTFSSYTLAWVRQAPGKGLEWVAAIDSSSYTYSPDTVRGRFTISRDNAKNSLYLQMNSLRAEDTAVYYCARDSNWDALDYWGQGTTVTVSSGGGGSGGGGSGGGGSDIQMTQSPSSLSASVGDRVTITCKVTEKVWGNVAWYQQKPGKAPISLIYSPSLRKSGVPSRFSGSGSGTDFTLTISSLQPEDFATYYCQQYYTYPYTFGGGTKVEIK

SEQ ID NO: 296 - protein, 659 aa, Artificial Sequence
  Description of Artificial Sequence: Synthetic polypeptide
VPRDCGCKPCICTVPEVSSVFIFPPKPKDVLTITLTPKVTCVVVDISKDDPEVQFSWFVDDVEVHTAQTQPREEQFNSTFRSVSELPIMHQDWLNGKEFKCRVNSAAFPAPIEKTISKTKGRPKAPQVYTIPPPKEQMAKDKVSLTCMITDFFPEDITVEWQWNGQPAENYKNTQPIMDTDGSYFVYSKLNVQKSNWEAGNTFTCSVLHEGLHNHHTEKSLSHSPGKSGGPALFKSSFPPGSAPTSSSTKKTQLQLEHLLLDLQMILNGINNYKNPKLTRMLTFKFYMPKKATELKHLQCLEEELKPLEEVLNLAQSKNFHLRPRDLISNINVIVLELKGSETTFMCEYADETATIVEFLNRWITFCQSIISTLTGGGGSGGGGSGGGGSGGGGSGGGGSGGGGSSGGPALFKSSFPPGSEVQLVESGGGLVQPGGSLRLSCAASGFTFSSYTLAWVRQAPGKCLEWVAAIDSSSYTYSPDTVRGRFTISRDNAKNSLYLQMNSLRAEDTAVYYCARDSNWDALDYWGQGTTVTVSSGGGGSGGGGSGGGGSDIQMTQSPSSLSASVGDRVTITCKAREKLWSAVAWYQQKPGKAPKSLIYSASFRYSGVPSRFSGSGSGTDFTLTISSLQPEDFATYYCQQYYTYPYTFGCGTKVEIK

SEQ ID NO: 297 - protein, 659 aa, Artificial Sequence
  Description of Artificial Sequence: Synthetic polypeptide
VPRDCGCKPCICTVPEVSSVFIFPPKPKDVLTITLTPKVTCVVVDISKDDPEVQFSWFVDDVEVHTAQTQPREEQFNSTFRSVSELPIMHQDWLNGKEFKCRVNSAAFPAPIEKTISKTKGRPKAPQVYTIPPPKEQMAKDKVSLTCMITDFFPEDITVEWQWNGQPAENYKNTQPIMDTDGSYFVYSKLNVQKSNWEAGNTFTCSVLHEGLHNHHTEKSLSHSPGKSGGPALFKSSFPPGSAPTSSSTKKTQLQLEHLLLDLQMILNGINNYKNPKLTRMLTFKFYMPKKATELKHLQCLEEELKPLEEVLNLAQSKNFHLRPRDLISNINVIVLELKGSETTFMCEYADETATIVEFLNRWITFCQSIISTLTGGGGSGGGGSGGGGSGGGGSGGGGSGGGGSSGGPALFKSSFPPGSEVQLVESGGGLVQPGGSLRLSCAASGFTFSSYTLAWVRQAPGKGLEWVAAIDSSSYTYSPDTVRGRFTISRDNAKNSLYLQMNSLRAEDTAVYYCARDSNWDALDYWGCGTTVTVSSGGGGSGGGGSGGGGSDIQMTQSPSSLSASVGDRVTITCKAREKLWSAVAWYQQKPGKCPKALIYSASFRYSGVPSRFSGSGSGTDFTLTISSLQPEDFATYYCQQYYTYPYTFGGGTKVEIK

SEQ ID NO: 298 - protein, 659 aa, Artificial Sequence
  Description of Artificial Sequence: Synthetic polypeptide
VPRDCGCKPCICTVPEVSSVFIFPPKPKDVLTITLTPKVTCVVVDISKDDPEVQFSWFVDDVEVHTAQTQPREEQFNSTFRSVSELPIMHQDWLNGKEFKCRVNSAAFPAPIEKTISKTKGRPKAPQVYTIPPPKEQMAKDKVSLTCMITDFFPEDITVEWQWNGQPAENYKNTQPIMDTDGSYFVYSKLNVQKSNWEAGNTFTCSVLHEGLHNHHTEKSLSHSPGKSGGPALFKSSFPPGSAPTSSSTKKTQLQLEHLLLDLQMILNGINNYKNPKLTRMLTFKFYMPKKATELKHLQCLEEELKPLEEVLNLAQSKNFHLRPRDLISNINVIVLELKGSETTFMCEYADETATIVEFLNRWITFCQSIISTLTGGGGSGGGGSGGGGSGGGGSGGGGSGGGGSSGGPALFKSSFPPGSEVQLVESGGGLVQPGGSLRLSCAASGFTFSSYTLAWVRQAPGKCLEWVAAIDSSSYTYSPDTVRGRFTISRDNAKNSLYLQMNSLRAEDTAVYYCARDSNWDALDYWGQGTTVTVSSGGGGSGGGGSGGGGSDIQMTQSPSSLSASVGDRVTITCKVTEKVWGNVAWYQQKPGKAPISLIYSPSLRKSGVPSRFSGSGSGTDFTLTISSLQPEDFATYYCQQYYTYPYTFGCGTKVEIK

SEQ ID NO: 299 - protein, 659 aa, Artificial Sequence
  Description of Artificial Sequence: Synthetic polypeptide
VPRDCGCKPCICTVPEVSSVFIFPPKPKDVLTITLTPKVTCVVVDISKDDPEVQFSWFVDDVEVHTAQTQPREEQFNSTFRSVSELPIMHQDWLNGKEFKCRVNSAAFPAPIEKTISKTKGRPKAPQVYTIPPPKEQMAKDKVSLTCMITDFFPEDITVEWQWNGQPAENYKNTQPIMDTDGSYFVYSKLNVQKSNWEAGNTFTCSVLHEGLHNHHTEKSLSHSPGKSGGPALFKSSFPPGSAPTSSSTKKTQLQLEHLLLDLQMILNGINNYKNPKLTRMLTFKFYMPKKATELKHLQCLEEELKPLEEVLNLAQSKNFHLRPRDLISNINVIVLELKGSETTFMCEYADETATIVEFLNRWITFCQSIISTLTGGGGSGGGGSGGGGSGGGGSGGGGSGGGGSSGGPALFKSSFPPGSEVQLVESGGGLVQPGGSLRLSCAASGFTFSSYTLAWVRQAPGKGLEWVAAIDSSSYTYSPDTVRGRFTISRDNAKNSLYLQMNSLRAEDTAVYYCARDSNWDALDYWGCGTTVTVSSGGGGSGGGGSGGGGSDIQMTQSPSSLSASVGDRVTITCKVTEKVWGNVAWYQQKPGKCPISLIYSPSLRKSGVPSRFSGSGSGTDFTLTISSLQPEDFATYYCQQYYTYPYTFGGGTKVEIK

SEQ ID NO: 300 - protein, 662 aa, Artificial Sequence
  Description of Artificial Sequence: Synthetic polypeptide
MDMRVPAQLLGLLLLWLRGARCVPRDCGCKPCICTVPEVSSVFIFPPKPKDVLTITLTPKVTCVVVDISKDDPEVQFSWFVDDVEVHTAQTQPREEQFNSTFRSVSELPIMHQDWLNGKEFKCRVNSAAFPAPIEKTISKTKGRPKAPQVYTIPPPKEQMAKDKVSLTCMITDFFPEDITVEWQWNGQPAENYKNTQPIMDTDGSYFVYSKLNVQKSNWEAGNTFTCSVLHEGLHNHHTEKSLSHSPGKSGGPALFKSSFPPGSAPTSSSTKKTQLQLEHLLLDLQMILNGINNYKNPKLTRMLTFKFYMPKKATELKHLQCLEEELKPLEEVLNLAQSKNFHLRPRDLISNINVIVLELKGSETTFMCEYADETATIVEFLNRWITFCQSIISTLTGGGGSGGGGSGGGGSGGGGSGGGGSGGGGSSGGPALFKSSFPPGSEVQLVESGGGLVQPGGSLRLSCAASGFTFSSYTLAWVRQAPGKGLEWVAAIDSSSYTYSPDTVRGRFTISRDNAKNSLYLQMNSLRAEDTAVYYCARDSNWDALDYWGQGTTVTVSSASTKGPSVFPLAPSSKSTSGGTAALGCLVKDYFPEPVTVSWNSGALTSGVHTFPAVLQSSGLYSLSSVVTVPSSSLGTQTYICNVNHKPSNTKVDKRVEPKSC

SEQ ID NO: 301 - protein, 214 aa, Artificial Sequence; identical to SEQ ID NO: 264
  Description of Artificial Sequence: Synthetic polypeptide

SEQ ID NO: 302 - protein, 661 aa, Artificial Sequence
  Description of Artificial Sequence: Synthetic polypeptide
ESKYGPPCPPCPAPEFLGGPSVFLFPPKPKDTLMISRTPEVTCVVVDVSQEDPEVQFNWYVDGVEVHNAKTKPREEQFNSTYRVVSVLTVLHQDWLNGKEYKCKVSNKGLPSSIEKTISKAKGQPREPQVYTLPPSQEEMTKNQVSLTCLVKGFYPSDIAVEWESNGQPENNYKTTPPVLDSDGSFFLYSRLTVDKSRWQEGNVFSCSVMHEALHNHYTQKSLSLSLGKSGGPGPAGLYAQPGSAPTSSSTKKTQLQLEHLLLDLQMILNGINNYKNPKLTRMLTFKFYMPKKATELKHLQCLEEELKPLEEVLNLAQSKNFHLRPRDLISNINVIVLELKGSETTFMCEYADETATIVEFLNRWITFCQSIISTLTGGGGSGGGGSGGGGSGGGGSGGGGSGGGGSSGGPGPAGLYAQPGSEVQLVESGGGLVQPGGSLRLSCAASGFTFSSYTLAWVRQAPGKCLEWVAAIDSSSYTYSPDTVRGRFTISRDNAKNSLYLQMNSLRAEDTAVYYCARDSNWDALDYWGQGTTVTVSSGGGGSGGGGSGGGGSDIQMTQSPSSLSASVGDRVTITCKASQNVGTNVGWYQQKPGKAPKALIYSASFRYSGVPSRFSGSGSGTDFTLTISSLQPEDFATYYCQQYYTYPYTFGCGTKVEIK

SEQ ID NO: 303 - protein, 661 aa, Artificial Sequence
  Description of Artificial Sequence: Synthetic polypeptide
ESKYGPPCPPCPAPEFLGGPSVFLFPPKPKDTLMISRTPEVTCVVVDVSQEDPEVQFNWYVDGVEVHNAKTKPREEQFNSTYRVVSVLTVLHQDWLNGKEYKCKVSNKGLPSSIEKTISKAKGQPREPQVYTLPPSQEEMTKNQVSLTCLVKGFYPSDIAVEWESNGQPENNYKTTPPVLDSDGSFFLYSRLTVDKSRWQEGNVFSCSVMHEALHNHYTQKSLSLSLGKSGGPGPAGLYAQPGSAPTSSSTKKTQLQLEHLLLDLQMILNGINNYKNPKLTRMLTFKFYMPKKATELKHLQCLEEELKPLEEVLNLAQSKNFHLRPRDLISNINVIVLELKGSETTFMCEYADETATIVEFLNRWITFCQSIISTLTGGGGSGGGGSGGGGSGGGGSGGGGSGGGGSSGGPGPAGLYAQPGSEVQLVESGGGLVQPGGSLRLSCAASGFTFSSYTLAWVRQAPGKGLEWVAAIDSSSYTYSPDTVRGRFTISRDNAKNSLYLQMNSLRAEDTAVYYCARDSNWDALDYWGCGTTVTVSSGGGGSGGGGSGGGGSDIQMTQSPSSLSASVGDRVTITCKASQNVGTNVGWYQQKPGKCPKALIYSASFRYSGVPSRFSGSGSGTDFTLTISSLQPEDFATYYCQQYYTYPYTFGGGTKVEIK

SEQ ID NO: 304 - protein, 661 aa, Artificial Sequence
  Description of Artificial Sequence: Synthetic polypeptide
ESKYGPPCPPCPAPEFLGGPSVFLFPPKPKDTLMISRTPEVTCVVVDVSQEDPEVQFNWYVDGVEVHNAKTKPREEQFNSTYRVVSVLTVLHQDWLNGKEYKCKVSNKGLPSSIEKTISKAKGQPREPQVYTLPPSQEEMTKNQVSLTCLVKGFYPSDIAVEWESNGQPENNYKTTPPVLDSDGSFFLYSRLTVDKSRWQEGNVFSCSVMHEALHNHYTQKSLSLSLGKSGGPGPAGLYAQPGSAPTSSSTKKTQLQLEHLLLDLQMILNGINNYKNPKLTRMLTFKFYMPKKATELKHLQCLEEELKPLEEVLNLAQSKNFHLRPRDLISNINVIVLELKGSETTFMCEYADETATIVEFLNRWITFCQSIISTLTGGGGSGGGGSGGGGSGGGGSGGGGSGGGGSSGGPGPAGLYAQPGSEVQLVESGGGLVQPGGSLRLSCAASGFTFSSYTLAWVRQAPGKCLEWVAAIDSSSYTYSPDTVRGRFTISRDNAKNSLYLQMNSLRAEDTAVYYCARDSNWDALDYWGQGTTVTVSSGGGGSGGGGSGGGGSDIQMTQSPSSLSASVGDRVTITCKAREKLWSAVAWYQQKPGKAPKALIYSASFRYSGVPSRFSGSGSGTDFTLTISSLQPEDFATYYCQQYYTYPYTFGCGTKVEIK

SEQ ID NO: 305 - protein, 661 aa, Artificial Sequence
  Description of Artificial Sequence: Synthetic polypeptide
ESKYGPPCPPCPAPEFLGGPSVFLFPPKPKDTLMISRTPEVTCVVVDVSQEDPEVQFNWYVDGVEVHNAKTKPREEQFNSTYRVVSVLTVLHQDWLNGKEYKCKVSNKGLPSSIEKTISKAKGQPREPQVYTLPPSQEEMTKNQVSLTCLVKGFYPSDIAVEWESNGQPENNYKTTPPVLDSDGSFFLYSRLTVDKSRWQEGNVFSCSVMHEALHNHYTQKSLSLSLGKSGGPGPAGLYAQPGSAPTSSSTKKTQLQLEHLLLDLQMILNGINNYKNPKLTRMLTFKFYMPKKATELKHLQCLEEELKPLEEVLNLAQSKNFHLRPRDLISNINVIVLELKGSETTFMCEYADETATIVEFLNRWITFCQSIISTLTGGGGSGGGGSGGGGSGGGGSGGGGSGGGGSSGGPGPAGLYAQPGSEVQLVESGGGLVQPGGSLRLSCAASGFTFSSYTLAWVRQAPGKGLEWVAAIDSSSYTYSPDTVRGRFTISRDNAKNSLYLQMNSLRAEDTAVYYCARDSNWDALDYWGCGTTVTVSSGGGGSGGGGSGGGGSDIQMTQSPSSLSASVGDRVTITCKAREKLWSAVAWYQQKPGKCPKALIYSASFRYSGVPSRFSGSGSGTDFTLTISSLQPEDFATYYCQQYYTYPYTFGGGTKVEIK

SEQ ID NO: 306 - protein, 661 aa, Artificial Sequence
  Description of Artificial Sequence: Synthetic polypeptide
ESKYGPPCPPCPAPEFLGGPSVFLFPPKPKDTLMISRTPEVTCVVVDVSQEDPEVQFNWYVDGVEVHNAKTKPREEQFNSTYRVVSVLTVLHQDWLNGKEYKCKVSNKGLPSSIEKTISKAKGQPREPQVYTLPPSQEEMTKNQVSLTCLVKGFYPSDIAVEWESNGQPENNYKTTPPVLDSDGSFFLYSRLTVDKSRWQEGNVFSCSVMHEALHNHYTQKSLSLSLGKSGGPGPAGLYAQPGSAPTSSSTKKTQLQLEHLLLDLQMILNGINNYKNPKLTRMLTFKFYMPKKATELKHLQCLEEELKPLEEVLNLAQSKNFHLRPRDLISNINVIVLELKGSETTFMCEYADETATIVEFLNRWITFCQSIISTLTGGGGSGGGGSGGGGSGGGGSGGGGSGGGGSSGGPGPAGLYAQPGSEVQLVESGGGLVQPGGSLRLSCAASGFTFSSYTLAWVRQAPGKCLEWVAAIDSSSYTYSPDTVRGRFTISRDNAKNSLYLQMNSLRAEDTAVYYCARDSNWDALDYWGQGTTVTVSSGGGGSGGGGSGGGGSDIQMTQSPSSLSASVGDRVTITCKVTEKVWGNVAWYQQKPGKAPISLIYSPSLRKSGVPSRFSGSGSGTDFTLTISSLQPEDFATYYCQQYYTYPYTFGCGTKVEIK

SEQ ID NO: 307 - protein, 661 aa, Artificial Sequence
  Description of Artificial Sequence: Synthetic polypeptide
ESKYGPPCPPCPAPEFLGGPSVFLFPPKPKDTLMISRTPEVTCVVVDVSQEDPEVQFNWYVDGVEVHNAKTKPREEQFNSTYRVVSVLTVLHQDWLNGKEYKCKVSNKGLPSSIEKTISKAKGQPREPQVYTLPPSQEEMTKNQVSLTCLVKGFYPSDIAVEWESNGQPENNYKTTPPVLDSDGSFFLYSRLTVDKSRWQEGNVFSCSVMHEALHNHYTQKSLSLSLGKSGGPGPAGLYAQPGSAPTSSSTKKTQLQLEHLLLDLQMILNGINNYKNPKLTRMLTFKFYMPKKATELKHLQCLEEELKPLEEVLNLAQSKNFHLRPRDLISNINVIVLELKGSETTFMCEYADETATIVEFLNRWITFCQSIISTLTGGGGSGGGGSGGGGSGGGGSGGGGSGGGGSSGGPGPAGLYAQPGSEVQLVESGGGLVQPGGSLRLSCAASGFTFSSYTLAWVRQAPGKGLEWVAAIDSSSYTYSPDTVRGRFTISRDNAKNSLYLQMNSLRAEDTAVYYCARDSNWDALDYWGCGTTVTVSSGGGGSGGGGSGGGGSDIQMTQSPSSLSASVGDRVTITCKVTEKVWGNVAWYQQKPGKCPISLIYSPSLRKSGVPSRFSGSGSGTDFTLTISSLQPEDFATYYCQQYYTYPYTFGGGTKVEIK

SEQ ID NO: 308 - protein, 541 aa, Artificial Sequence
  Description of Artificial Sequence: Synthetic polypeptide
ESKYGPPCPPCPAPEFLGGPSVFLFPPKPKDTLMISRTPEVTCVVVDVSQEDPEVQFNWYVDGVEVHNAKTKPREEQFNSTYRVVSVLTVLHQDWLNGKEYKCKVSNKGLPSSIEKTISKAKGQPREPQVYTLPPSQEEMTKNQVSLTCLVKGFYPSDIAVEWESNGQPENNYKTTPPVLDSDGSFFLYSRLTVDKSRWQEGNVFSCSVMHEALHNHYTQKSLSLSLGKSGGPGPAGLYAQPGSAPTSSSTKKTQLQLEHLLLDLQMILNGINNYKNPKLTRMLTFKFYMPKKATELKHLQCLEEELKPLEEVLNLAQSKNFHLRPRDLISNINVIVLELKGSETTFMCEYADETATIVEFLNRWITFCQSIISTLTGGGGSGGGGSGGGGSGGGGSGGGGSGGGGSSGGPGPAGLYAQPGSEVQLLESGGGLVQPGGSLRLSCAASGSIFSANAMGWYRQAPGKQRELVAVISSGGSTNYADSVKGRFTISRDNSKNTVYLQMNSLRAEDTAVYYCMYSGSYYYTPNDYWGQGTLVTVSS

SEQ ID NO: 309 - protein, 547 aa, Artificial Sequence
  Description of Artificial Sequence: Synthetic polypeptide
APTSSSTKKTQLQLEHLLLDLQMILNGINNYKNPKLTRMLTFKFYMPKKATELKHLQCLEEELKPLEEVLNLAQSKNFHLRPRDLISNINVIVLELKGSETTFMCEYADETATIVEFLNRWITFCQSIISTLTSGGPGPAGLYAQPGSEVQLVESGGGLVQPGNSLRLSCAASGFTFSKFGMSWVRQAPGKGLEWVSSISGSGRDTLYAESVKGRFTISRDNAKTTLYLQMNSLRPEDTAVYYCTIGGSLSVSSQGTLVTVSSGGGGSGGGGSGGGGSGGGGSGGGGSGGGGSSGGPGPAGLYAQPGSEVQLVESGGGLVQPGGSLRLSCAASGFTFSSYTLAWVRQAPGKCLEWVAAIDSSSYTYSPDTVRGRFTISRDNAKNSLYLQMNSLRAEDTAVYYCARDSNWDALDYWGQGTTVTVSSGGGGSGGGGSGGGGSDIQMTQSPSSLSASVGDRVTITCKAREKLWSAVAWYQQKPGKAPKSLIYSASFRYSGVPSRFSGSGSGTDFTLTISSLQPEDFATYYCQQYYTYPYTFGCGTKVEIK

SEQ ID NO: 310 - protein, 661 aa, Artificial Sequence
  Description of Artificial Sequence: Synthetic polypeptide
ESKYGPPCPPCPAPEFLGGPSVFLFPPKPKDTLMISRTPEVTCVVVDVSQEDPEVQFNWYVDGVEVHNAKTKPREEQFNSTYRVVSVLTVLHQDWLNGKEYKCKVSNKGLPSSIEKTISKAKGQPREPQVYTLPPSQEEMTKNQVSLTCLVKGFYPSDIAVEWESNGQPENNYKTTPPVLDSDGSFFLYSRLTVDKSRWQEGNVFSCSVMHEALHNHYTQKSLSLSLGKSGGPGPAGLYAQPGSAPTSSSTKKTQLQLEHLLLDLQMILNGINNYKNPKLTRMLTFKFYMPKKATELKHLQCLEEELKPLEEVLNLAQSKNFHLRPRDLISNINVIVLELKGSETTFMCEYADETATIVEFLNRWITFCQSIISTLTGGGGSGGGGSGGGGSGGGGSGGGGSGGGGSSGGPGPAGLYAQPGSEVQLVESGGGLVQPGGSLRLSCAASGFTFSSYTLAWVRQAPGKCLEWVAAIDSSSYTYSPDTVRGRFTISRDNAKNSLYLQMNSLRAEDTAVYYCARDSNWDALDYWGQGTTVTVSSGGGGSGGGGSGGGGSDIQMTQSPSSLSASVGDRVTITCKAREKLWSAVAWYQQKPGKAPKSLIYSASFRYSGVPSRFSGSGSGTDFTLTISSLQPEDFATYYCQQYYTYPYTFGCGTKVEIK

SEQ ID NO: 311 - protein, 811 aa, Artificial Sequence
  Description of Artificial Sequence: Synthetic polypeptide
APTSSSTKKTQLQLEHLLLDLQMILNGINNYKNPKLTRMLTFKFYMPKKATELKHLQCLEEELKPLEEVLNLAQSKNFHLRPRDLISNINVIVLELKGSETTFMCEYADETATIVEFLNRWITFCQSIISTLTSGGPGPAGLYAQPGSGGGGSGGGGSGGGGSGGGGSGGGGSGGGGSELCDDDPPEIPHATFKAMAYKEGTMLNCECKRGFRRIKSGSLYMLCTGNSSHSSWDNQCQCTSSATRNTTKQVTPQPEEQKERKTTEMQSPMQPVDQASLPGHCREPPPWENEATERIYHFVVGQMVYYQCVQGYRALHRGPAESVCKMTHGKTRWTQPQLICTGEMETSQFPGEEKPQASPEGRPESETSSLVTTTDFQIQTEMAATMETSIFTTEYQSGGPGPAGLYAQPGSEVQLVESGGGLVQPGNSLRLSCAASGFTFSKFGMSWVRQAPGKGLEWVSSISGSGRDTLYAESVKGRFTISRDNAKTTLYLQMNSLRPEDTAVYYCTIGGSLSVSSQGTLVTVSSGGGGSGGGGSGGGGSGGGGSGGGGSGGGGSSGGPGPAGLYAQPGSEVQLVESGGGLVQPGGSLRLSCAASGFTFSSYTLAWVRQAPGKCLEWVAAIDSSSYTYSPDTVRGRFTISRDNAKNSLYLQMNSLRAEDTAVYYCARDSNWDALDYWGQGTTVTVSSGGGGSGGGGSGGGGSDIQMTQSPSSLSASVGDRVTITCKAREKLWSAVAWYQQKPGKAPKSLIYSASFRYSGVPSRFSGSGSGTDFTLTISSLQPEDFATYYCQQYYTYPYTFGCGTKVEIK

SEQ ID NO: 312 - protein, 811 aa, Artificial Sequence
  Description of Artificial Sequence: Synthetic polypeptide
APTSSSTKKTQLQLEHLLLDLQMILNGINNYKNPKLTRMLTFKFYMPKKATELKHLQCLEEELKPLEEVLNLAQSKNFHLRPRDLISNINVIVLELKGSETTFMCEYADETATIVEFLNRWITFCQSIISTLTSGGPGPAGLYAQPGSGGGGSGGGGSGGGGSGGGGSGGGGSGGGGSELCDDDPPEIPHATFKAMAYKEGTMLNCECKRGFRRIKSGSLYMLCTGNSSHSSWDNQCQCTSSATRNTTKQVTPQPEEQKERKTTEMQSPMQPVDQASLPGHCREPPPWENEATERIYHFVVGQMVYYQCVQGYRALHRGPAESVCKMTHGKTRWTQPQLICTGEMETSQFPGEEKPQASPEGRPESETSSLVTTTDFQIQTEMAATMETSIFTTEYQSGGPGPAGLYAQPGSEVQLVESGGGLVQPGNSLRLSCAASGFTFSKFGMSWVRQAPGKGLEWVSSISGSGRDTLYAESVKGRFTISRDNAKTTLYLQMNSLRPEDTAVYYCTIGGSLSVSSQGTLVTVSSGGGGSGGGGSGGGGSGGGGSGGGGSGGGGSSGGPGPAGLYAQPGSEVQLVESGGGLVQPGGSLRLSCAASGFTFSSYTLAWVRQAPGKGLEWVAAIDSSSYTYSPDTVRGRFTISRDNAKNSLYLQMNSLRAEDTAVYYCARDSNWDALDYWGCGTTVTVSSGGGGSGGGGSGGGGSDIQMTQSPSSLSASVGDRVTITCKAREKLWSAVAWYQQKPGKCPKALIYSASFRYSGVPSRFSGSGSGTDFTLTISSLQPEDFATYYCQQYYTYPYTFGGGTKVEIK

SEQ ID NO: 313 - protein, 811 aa, Artificial Sequence
  Description of Artificial Sequence: Synthetic polypeptide
APTSSSTKKTQLQLEHLLLDLQMILNGINNYKNPKLTRMLTFKFYMPKKATELKHLQCLEEELKPLEEVLNLAQSKNFHLRPRDLISNINVIVLELKGSETTFMCEYADETATIVEFLNRWITFCQSIISTLTSGGPGPAGLYAQPGSGGGGSGGGGSGGGGSGGGGSGGGGSGGGGSELCDDDPPEIPHATFKAMAYKEGTMLNCECKRGFRRIKSGSLYMLCTGNSSHSSWDNQCQCTSSATRNTTKQVTPQPEEQKERKTTEMQSPMQPVDQASLPGHCREPPPWENEATERIYHFVVGQMVYYQCVQGYRALHRGPAESVCKMTHGKTRWTQPQLICTGEMETSQFPGEEKPQASPEGRPESETSSLVTTTDFQIQTEMAATMETSIFTTEYQSGGPGPAGLYAQPGSEVQLVESGGGLVQPGNSLRLSCAASGFTFSKFGMSWVRQAPGKGLEWVSSISGSGRDTLYAESVKGRFTISRDNAKTTLYLQMNSLRPEDTAVYYCTIGGSLSVSSQGTLVTVSSGGGGSGGGGSGGGGSGGGGSGGGGSGGGGSSGGPGPAGLYAQPGSEVQLVESGGGLVQPGGSLRLSCAASGFTFSSYTLAWVRQAPGKCLEWVAAIDSSSYTYSPDTVRGRFTISRDNAKNSLYLQMNSLRAEDTAVYYCARDSNWDALDYWGQGTTVTVSSGGGGSGGGGSGGGGSDIQMTQSPSSLSASVGDRVTITCKVTEKVWGNVAWYQQKPGKAPISLIYSPSLRKSGVPSRFSGSGSGTDFTLTISSLQPEDFATYYCQQYYTYPYTFGCGTKVEIK

SEQ ID NO: 314 - protein, 811 aa, Artificial Sequence
  Description of Artificial Sequence: Synthetic polypeptide
APTSSSTKKTQLQLEHLLLDLQMILNGINNYKNPKLTRMLTFKFYMPKKATELKHLQCLEEELKPLEEVLNLAQSKNFHLRPRDLISNINVIVLELKGSETTFMCEYADETATIVEFLNRWITFCQSIISTLTSGGPGPAGLYAQPGSGGGGSGGGGSGGGGSGGGGSGGGGSGGGGSELCDDDPPEIPHATFKAMAYKEGTMLNCECKRGFRRIKSGSLYMLCTGNSSHSSWDNQCQCTSSATRNTTKQVTPQPEEQKERKTTEMQSPMQPVDQASLPGHCREPPPWENEATERIYHFVVGQMVYYQCVQGYRALHRGPAESVCKMTHGKTRWTQPQLICTGEMETSQFPGEEKPQASPEGRPESETSSLVTTTDFQIQTEMAATMETSIFTTEYQSGGPGPAGLYAQPGSEVQLVESGGGLVQPGNSLRLSCAASGFTFSKFGMSWVRQAPGKGLEWVSSISGSGRDTLYAESVKGRFTISRDNAKTTLYLQMNSLRPEDTAVYYCTIGGSLSVSSQGTLVTVSSGGGGSGGGGSGGGGSGGGGSGGGGSGGGGSSGGPGPAGLYAQPGSEVQLVESGGGLVQPGGSLRLSCAASGFTFSSYTLAWVRQAPGKGLEWVAAIDSSSYTYSPDTVRGRFTISRDNAKNSLYLQMNSLRAEDTAVYYCARDSNWDALDYWGCGTTVTVSSGGGGSGGGGSGGGGSDIQMTQSPSSLSASVGDRVTITCKVTEKVWGNVAWYQQKPGKCPISLIYSPSLRKSGVPSRFSGSGSGTDFTLTISSLQPEDFATYYCQQYYTYPYTFGGGTKVEIK

SEQ ID NO: 315 - protein, 691 aa, Artificial Sequence
  Description of Artificial Sequence: Synthetic polypeptide
APTSSSTKKTQLQLEHLLLDLQMILNGINNYKNPKLTRMLTFKFYMPKKATELKHLQCLEEELKPLEEVLNLAQSKNFHLRPRDLISNINVIVLELKGSETTFMCEYADETATIVEFLNRWITFCQSIISTLTSGGPGPAGLYAQPGSGGGGSGGGGSGGGGSGGGGSGGGGSGGGGSELCDDDPPEIPHATFKAMAYKEGTMLNCECKRGFRRIKSGSLYMLCTGNSSHSSWDNQCQCTSSATRNTTKQVTPQPEEQKERKTTEMQSPMQPVDQASLPGHCREPPPWENEATERIYHFVVGQMVYYQCVQGYRALHRGPAESVCKMTHGKTRWTQPQLICTGEMETSQFPGEEKPQASPEGRPESETSSLVTTTDFQIQTEMAATMETSIFTTEYQSGGPGPAGLYAQPGSEVQLVESGGGLVQPGNSLRLSCAASGFTFSKFGMSWVRQAPGKGLEWVSSISGSGRDTLYAESVKGRFTISRDNAKTTLYLQMNSLRPEDTAVYYCTIGGSLSVSSQGTLVTVSSGGGGSGGGGSGGGGSGGGGSGGGGSGGGGSSGGPGPAGLYAQPGSEVQLLESGGGLVQPGGSLRLSCAASGSIFSANAMGWYRQAPGKQRELVAVISSGGSTNYADSVKGRFTISRDNSKNTVYLQMNSLRAEDTAVYYCMYSGSYYYTPNDYWGQGTLVTVSS

SEQ ID NO: 316 - protein, 691 aa, Artificial Sequence
  Description of Artificial Sequence: Synthetic polypeptide
APTSSSTKKTQLQLEHLLLDLQMILNGINNYKNPKLTRMLTFKFYMPKKATELKHLQCLEEELKPLEEVLNLAQSKNFHLRPRDLISNINVIVLELKGSETTFMCEYADETATIVEFLNRWITFCQSIISTLTSGGPGPAGLYAQPGSGGGGSGGGGSGGGGSGGGGSGGGGSGGGGSELCDDDPPEIPHATFKAMAYKEGTMLNCECKRGFRRIKSGSLYMLCTGNSSHSSWDNQCQCTSSATRNTTKQVTPQPEEQKERKTTEMQSPMQPVDQASLPGHCREPPPWENEATERIYHFVVGQMVYYQCVQGYRALHRGPAESVCKMTHGKTRWTQPQLICTGEMETSQFPGEEKPQASPEGRPESETSSLVTTTDFQIQTEMAATMETSIFTTEYQSGGPGPAGLYAQPGSEVQLVESGGGLVQPGNSLRLSCAASGFTFSKFGMSWVRQAPGKGLEWVSSISGSGRDTLYAESVKGRFTISRDNAKTTLYLQMNSLRPEDTAVYYCTIGGSLSVSSQGTLVTVSSGGGGSGGGGSGGGGSGGGGSGGGGSGGGGSSGGPGPAGLYAQPGSEVQLLESGGGLVQPGGSLRLSCAASGSIFSANAMGWYRQAPGKGLELVAVISSGGSTNYADSVKGRFTISRDNSKNTVYLQMNSLRAEDTAVYYCMYSGSYYYTPNDYWGQGTLVTVSS

SEQ ID NO: 317 - protein, 792 aa, Artificial Sequence
  Description of Artificial Sequence: Synthetic polypeptide
APTSSSTKKTQLQLEHLLLDLQMILNGINNYKNPKLTRMLTFKFYMPKKATELKHLQCLEEELKPLEEVLNLAQSKNFHLRPRDLISNINVIVLELKGSETTFMCEYADETATIVEFLNRWITFCQSIISTLTSGGPGPAGLYAQPGSGGGGSGGGGSGGGGSGGGGSGGGGSGGGGSELCDDDPPEIPHATFKAMAYKEGTMLNCECKRGFRRIKSGSLYMLCTGNSSHSSWDNQCQCTSSATRNTTKQVTPQPEEQKERKTTEMQSPMQPVDQASLPGHCREPPPWENEATERIYHFVVGQMVYYQCVQGYRALHRGPAESVCKMTHGKTRWTQPQLICTGEMETSQFPGEEKPQASPEGRPESETSSLVTTTDFQIQTEMAATMETSIFTTEYQSGGPGPAGLYAQPGSEVQLVESGGGLVQPGNSLRLSCAASGFTFSKFGMSWVRQAPGKGLEWVSSISGSGRDTLYAESVKGRFTISRDNAKTTLYLQMNSLRPEDTAVYYCTIGGSLSVSSQGTLVTVSSGGGGSGGGGSGGGGSGGGGSGGGGSGGGGSSGGPGPAGLYAQPGSEVQLVESGGGLVQPGGSLRLSCAASGFTFSSYTLAWVRQAPGKGLEWVAAIDSSSYTYSPDTVRGRFTISRDNAKNSLYLQMNSLRAEDTAVYYCARDSNWDALDYWGQGTTVTVSSASTKGPSVFPLAPSSKSTSGGTAALGCLVKDYFPEPVTVSWNSGALTSGVHTFPAVLQSSGLYSLSSVVTVPSSSLGTQTYICNVNHKPSNTKVDKRVEPKSC

SEQ ID NO: 318 - protein, 676 aa, Artificial Sequence
  Description of Artificial Sequence: Synthetic polypeptide
EVQLVESGGGLVQPGGSLRLSCAASGFTFSSYTLAWVRQAPGKCLEWVAAIDSSSYTYSPDTVRGRFTISRDNAKNSLYLQMNSLRAEDTAVYYCARDSNWDALDYWGQGTTVTVSSGGGGSGGGGSGGGGSDIQMTQSPSSLSASVGDRVTITCKAREKLWSAVAWYQQKPGKAPKSLIYSASFRYSGVPSRFSGSGSGTDFTLTISSLQPEDFATYYCQQYYTYPYTFGCGTKVEIKSGGPGPAGLYAQPGSGGGGSGGGGSGGGGSGGGGSGGGGSGGGGSEVQLVESGGGLVQPGNSLRLSCAASGFTFSKFGMSWVRQAPGKGLEWVSSISGSGRDTLYAESVKGRFTISRDNAKTTLYLQMNSLRPEDTAVYYCTIGGSLSVSSQGTLVTVSSSGGPGPAGLYAQPGSTFKFYMPKKATELKHLQCLEEELKPLEEVLNLAQSKNFHLRPRDLISNINVIVLELKGSETTFMCEYADETATIVEFLNRWITFCQSIISTLTGGSSSTKKTQLQLEHLLLDLQMILNGINNYKNPKLTRMLSGGPGPAGLYAQPGSEVQLVESGGGLVQPGNSLRLSCAASGFTFSKFGMSWVRQAPGKGLEWVSSISGSGRDTLYAESVKGRFTISRDNAKTTLYLQMNSLRPEDTAVYYCTIGGSLSVSSQGTLVTVSS

SEQ ID NO: 319 - protein, 676 aa, Artificial Sequence
  Description of Artificial Sequence: Synthetic polypeptide
EVQLVESGGGLVQPGGSLRLSCAASGFTFSSYTLAWVRQAPGKGLEWVAAIDSSSYTYSPDTVRGRFTISRDNAKNSLYLQMNSLRAEDTAVYYCARDSNWDALDYWGCGTTVTVSSGGGGSGGGGSGGGGSDIQMTQSPSSLSASVGDRVTITCKAREKLWSAVAWYQQKPGKCPKALIYSASFRYSGVPSRFSGSGSGTDFTLTISSLQPEDFATYYCQQYYTYPYTFGGGTKVEIKSGGPGPAGLYAQPGSGGGGSGGGGSGGGGSGGGGSGGGGSGGGGSEVQLVESGGGLVQPGNSLRLSCAASGFTFSKFGMSWVRQAPGKGLEWVSSISGSGRDTLYAESVKGRFTISRDNAKTTLYLQMNSLRPEDTAVYYCTIGGSLSVSSQGTLVTVSSSGGPGPAGLYAQPGSTFKFYMPKKATELKHLQCLEEELKPLEEVLNLAQSKNFHLRPRDLISNINVIVLELKGSETTFMCEYADETATIVEFLNRWITFCQSIISTLTGGSSSTKKTQLQLEHLLLDLQMILNGINNYKNPKLTRMLSGGPGPAGLYAQPGSEVQLVESGGGLVQPGNSLRLSCAASGFTFSKFGMSWVRQAPGKGLEWVSSISGSGRDTLYAESVKGRFTISRDNAKTTLYLQMNSLRPEDTAVYYCTIGGSLSVSSQGTLVTVSS

SEQ ID NO: 320 - protein, 676 aa, Artificial Sequence
  Description of Artificial Sequence: Synthetic polypeptide
EVQLVESGGGLVQPGGSLRLSCAASGFTFSSYTLAWVRQAPGKCLEWVAAIDSSSYTYSPDTVRGRFTISRDNAKNSLYLQMNSLRAEDTAVYYCARDSNWDALDYWGQGTTVTVSSGGGGSGGGGSGGGGSDIQMTQSPSSLSASVGDRVTITCKVTEKVWGNVAWYQQKPGKAPISLIYSPSLRKSGVPSRFSGSGSGTDFTLTISSLQPEDFATYYCQQYYTYPYTFGCGTKVEIKSGGPGPAGLYAQPGSGGGGSGGGGSGGGGSGGGGSGGGGSGGGGSEVQLVESGGGLVQPGNSLRLSCAASGFTFSKFGMSWVRQAPGKGLEWVSSISGSGRDTLYAESVKGRFTISRDNAKTTLYLQMNSLRPEDTAVYYCTIGGSLSVSSQGTLVTVSSSGGPGPAGLYAQPGSTFKFYMPKKATELKHLQCLEEELKPLEEVLNLAQSKNFHLRPRDLISNINVIVLELKGSETTFMCEYADETATIVEFLNRWITFCQSIISTLTGGSSSTKKTQLQLEHLLLDLQMILNGINNYKNPKLTRMLSGGPGPAGLYAQPGSEVQLVESGGGLVQPGNSLRLSCAASGFTFSKFGMSWVRQAPGKGLEWVSSISGSGRDTLYAESVKGRFTISRDNAKTTLYLQMNSLRPEDTAVYYCTIGGSLSVSSQGTLVTVSS

SEQ ID NO: 321 - protein, 676 aa, Artificial Sequence
  Description of Artificial Sequence: Synthetic polypeptide
EVQLVESGGGLVQPGGSLRLSCAASGFTFSSYTLAWVRQAPGKGLEWVAAIDSSSYTYSPDTVRGRFTISRDNAKNSLYLQMNSLRAEDTAVYYCARDSNWDALDYWGCGTTVTVSSGGGGSGGGGSGGGGSDIQMTQSPSSLSASVGDRVTITCKVTEKVWGNVAWYQQKPGKCPISLIYSPSLRKSGVPSRFSGSGSGTDFTLTISSLQPEDFATYYCQQYYTYPYTFGGGTKVEIKSGGPGPAGLYAQPGSGGGGSGGGGSGGGGSGGGGSGGGGSGGGGSEVQLVESGGGLVQPGNSLRLSCAASGFTFSKFGMSWVRQAPGKGLEWVSSISGSGRDTLYAESVKGRFTISRDNAKTTLYLQMNSLRPEDTAVYYCTIGGSLSVSSQGTLVTVSSSGGPGPAGLYAQPGSTFKFYMPKKATELKHLQCLEEELKPLEEVLNLAQSKNFHLRPRDLISNINVIVLELKGSETTFMCEYADETATIVEFLNRWITFCQSIISTLTGGSSSTKKTQLQLEHLLLDLQMILNGINNYKNPKLTRMLSGGPGPAGLYAQPGSEVQLVESGGGLVQPGNSLRLSCAASGFTFSKFGMSWVRQAPGKGLEWVSSISGSGRDTLYAESVKGRFTISRDNAKTTLYLQMNSLRPEDTAVYYCTIGGSLSVSSQGTLVTVSS

SEQ ID NO: 322 - protein, 556 aa, Artificial Sequence
  Description of Artificial Sequence: Synthetic polypeptide
EVQLLESGGGLVQPGGSLRLSCAASGSIFSANAMGWYRQAPGKQRELVAVISSGGSTNYADSVKGRFTISRDNSKNTVYLQMNSLRAEDTAVYYCMYSGSYYYTPNDYWGQGTLVTVSSSGGPGPAGLYAQPGSGGGGSGGGGSGGGGSGGGGSGGGGSGGGGSEVQLVESGGGLVQPGNSLRLSCAASGFTFSKFGMSWVRQAPGKGLEWVSSISGSGRDTLYAESVKGRFTISRDNAKTTLYLQMNSLRPEDTAVYYCTIGGSLSVSSQGTLVTVSSSGGPGPAGLYAQPGSTFKFYMPKKATELKHLQCLEEELKPLEEVLNLAQSKNFHLRPRDLISNINVIVLELKGSETTFMCEYADETATIVEFLNRWITFCQSIISTLTGGSSSTKKTQLQLEHLLLDLQMILNGINNYKNPKLTRMLSGGPGPAGLYAQPGSEVQLVESGGGLVQPGNSLRLSCAASGFTFSKFGMSWVRQAPGKGLEWVSSISGSGRDTLYAESVKGRFTISRDNAKTTLYLQMNSLRPEDTAVYYCTIGGSLSVSSQGTLVTVSS

SEQ ID NO: 323 - protein, 556 aa, Artificial Sequence
  Description of Artificial Sequence: Synthetic polypeptide
EVQLLESGGGLVQPGGSLRLSCAASGSIFSANAMGWYRQAPGKGLELVAVISSGGSTNYADSVKGRFTISRDNSKNTVYLQMNSLRAEDTAVYYCMYSGSYYYTPNDYWGQGTLVTVSSSGGPGPAGLYAQPGSGGGGSGGGGSGGGGSGGGGSGGGGSGGGGSEVQLVESGGGLVQPGNSLRLSCAASGFTFSKFGMSWVRQAPGKGLEWVSSISGSGRDTLYAESVKGRFTISRDNAKTTLYLQMNSLRPEDTAVYYCTIGGSLSVSSQGTLVTVSSSGGPGPAGLYAQPGSTFKFYMPKKATELKHLQCLEEELKPLEEVLNLAQSKNFHLRPRDLISNINVIVLELKGSETTFMCEYADETATIVEFLNRWITFCQSIISTLTGGSSSTKKTQLQLEHLLLDLQMILNGINNYKNPKLTRMLSGGPGPAGLYAQPGSEVQLVESGGGLVQPGNSLRLSCAASGFTFSKFGMSWVRQAPGKGLEWVSSISGSGRDTLYAESVKGRFTISRDNAKTTLYLQMNSLRPEDTAVYYCTIGGSLSVSSQGTLVTVSS

SEQ ID NO: 324 - protein, 657 aa, Artificial Sequence
  Description of Artificial Sequence: Synthetic polypeptide
EVQLVESGGGLVQPGGSLRLSCAASGFTFSSYTLAWVRQAPGKGLEWVAAIDSSSYTYSPDTVRGRFTISRDNAKNSLYLQMNSLRAEDTAVYYCARDSNWDALDYWGQGTTVTVSSASTKGPSVFPLAPSSKSTSGGTAALGCLVKDYFPEPVTVSWNSGALTSGVHTFPAVLQSSGLYSLSSVVTVPSSSLGTQTYICNVNHKPSNTKVDKRVEPKSCSGGPGPAGLYAQPGSGGGGSGGGGSGGGGSGGGGSGGGGSGGGGSEVQLVESGGGLVQPGNSLRLSCAASGFTFSKFGMSWVRQAPGKGLEWVSSISGSGRDTLYAESVKGRFTISRDNAKTTLYLQMNSLRPEDTAVYYCTIGGSLSVSSQGTLVTVSSSGGPGPAGLYAQPGSTFKFYMPKKATELKHLQCLEEELKPLEEVLNLAQSKNFHLRPRDLISNINVIVLELKGSETTFMCEYADETATIVEFLNRWITFCQSIISTLTGGSSSTKKTQLQLEHLLLDLQMILNGINNYKNPKLTRMLSGGPGPAGLYAQPGSEVQLVESGGGLVQPGNSLRLSCAASGFTFSKFGMSWVRQAPGKGLEWVSSISGSGRDTLYAESVKGRFTISRDNAKTTLYLQMNSLRPEDTAVYYCTIGGSLSVSSQGTLVTVSS

SEQ ID NO: 325 - protein, 640 aa, Artificial Sequence
  Description of Artificial Sequence: Synthetic polypeptide
VPRDCGCKPCICTVPEVSSVFIFPPKPKDVLTITLTPKVTCVVVDISKDDPEVQFSWFVDDVEVHTAQTQPREEQFNSTFRSVSELPIMHQDWLNGKEFKCRVNSAAFPAPIEKTISKTKGRPKAPQVYTIPPPKEQMAKDKVSLTCMITDFFPEDITVEWQWNGQPAENYKNTQPIMDTDGSYFVYSKLNVQKSNWEAGNTFTCSVLHEGLHNHHTEKSLSHSPGKSGGPGPAGLYAQPGSAPTSSSTKKTQLQLEHLLLDLQMILNGINNYKNPKLTRMLTFKFYMPKKATELKHLQCLEEELKPLEEVLNLAQSKNFHLRPRDLISNINVIVLELKGSETTFMCEYADETATIVEFLNRWITFCQSIISTLTGGGGSGGGGSGGGGSGGGGSGGGGSGGGGSSGGPGPAGLYAQPGSEVQLVESGGGLVQPGGSLRLSCAASGFTFSSYTLAWVRQAPGKGLEWVAAIDSSSYTYSPDTVRGRFTISRDNAKNSLYLQMNSLRAEDTAVYYCARDSNWDALDYWGQGTTVTVSSASTKGPSVFPLAPSSKSTSGGTAALGCLVKDYFPEPVTVSWNSGALTSGVHTFPAVLQSSGLYSLSSVVTVPSSSLGTQTYICNVNHKPSNTKVDKRVEPKSC

SEQ ID NO: 326 - protein, 659 aa, Artificial Sequence
  Description of Artificial Sequence: Synthetic polypeptide
VPRDCGCKPCICTVPEVSSVFIFPPKPKDVLTITLTPKVTCVVVDISKDDPEVQFSWFVDDVEVHTAQTQPREEQFNSTFRSVSELPIMHQDWLNGKEFKCRVNSAAFPAPIEKTISKTKGRPKAPQVYTIPPPKEQMAKDKVSLTCMITDFFPEDITVEWQWNGQPAENYKNTQPIMDTDGSYFVYSKLNVQKSNWEAGNTFTCSVLHEGLHNHHTEKSLSHSPGKSGGPGPAGLYAQPGSAPTSSSTKKTQLQLEHLLLDLQMILNGINNYKNPKLTRMLTFKFYMPKKATELKHLQCLEEELKPLEEVLNLAQSKNFHLRPRDLISNINVIVLELKGSETTFMCEYADETATIVEFLNRWITFCQSIISTLTGGGGSGGGGSGGGGSGGGGSGGGGSGGGGSSGGPGPAGLYAQPGSEVQLVESGGGLVQPGGSLRLSCAASGFTFSSYTLAWVRQAPGKCLEWVAAIDSSSYTYSPDTVRGRFTISRDNAKNSLYLQMNSLRAEDTAVYYCARDSNWDALDYWGQGTTVTVSSGGGGSGGGGSGGGGSDIQMTQSPSSLSASVGDRVTITCKAREKLWSAVAWYQQKPGKAPKALIYSASFRYSGVPSRFSGSGSGTDFTLTISSLQPEDFATYYCQQYYTYPYTFGCGTKVEIK

SEQ ID NO: 327 - protein, 659 aa, Artificial Sequence
  Description of Artificial Sequence: Synthetic polypeptide
VPRDCGCKPCICTVPEVSSVFIFPPKPKDVLTITLTPKVTCVVVDISKDDPEVQFSWFVDDVEVHTAQTQPREEQFNSTFRSVSELPIMHQDWLNGKEFKCRVNSAAFPAPIEKTISKTKGRPKAPQVYTIPPPKEQMAKDKVSLTCMITDFFPEDITVEWQWNGQPAENYKNTQPIMDTDGSYFVYSKLNVQKSNWEAGNTFTCSVLHEGLHNHHTEKSLSHSPGKSGGPGPAGLYAQPGSAPTSSSTKKTQLQLEHLLLDLQMILNGINNYKNPKLTRMLTFKFYMPKKATELKHLQCLEEELKPLEEVLNLAQSKNFHLRPRDLISNINVIVLELKGSETTFMCEYADETATIVEFLNRWITFCQSIISTLTGGGGSGGGGSGGGGSGGGGSGGGGSGGGGSSGGPGPAGLYAQPGSEVQLVESGGGLVQPGGSLRLSCAASGFTFSSYTLAWVRQAPGKCLEWVAAIDSSSYTYSPDTVRGRFTISRDNAKNSLYLQMNSLRAEDTAVYYCARDSNWDALDYWGQGTTVTVSSGGGGSGGGGSGGGGSDIQMTQSPSSLSASVGDRVTITCKAREKLWSAVAWYQQKPGKAPKSLIYSASFRYSGVPSRFSGSGSGTDFTLTISSLQPEDFATYYCQQYYTYPYTFGCGTKVEIK

SEQ ID NO: 328 - protein, 659 aa, Artificial Sequence
  Description of Artificial Sequence: Synthetic polypeptide
VPRDCGCKPCICTVPEVSSVFIFPPKPKDVLTITLTPKVTCVVVDISKDDPEVQFSWFVDDVEVHTAQTQPREEQFNSTFRSVSELPIMHQDWLNGKEFKCRVNSAAFPAPIEKTISKTKGRPKAPQVYTIPPPKEQMAKDKVSLTCMITDFFPEDITVEWQWNGQPAENYKNTQPIMDTDGSYFVYSKLNVQKSNWEAGNTFTCSVLHEGLHNHHTEKSLSHSPGKSGGPGPAGLYAQPGSAPTSSSTKKTQLQLEHLLLDLQMILNGINNYKNPKLTRMLTFKFYMPKKATELKHLQCLEEELKPLEEVLNLAQSKNFHLRPRDLISNINVIVLELKGSETTFMCEYADETATIVEFLNRWITFCQSIISTLTGGGGSGGGGSGGGGSGGGGSGGGGSGGGGSSGGPGPAGLYAQPGSEVQLVESGGGLVQPGGSLRLSCAASGFTFSSYTLAWVRQAPGKGLEWVAAIDSSSYTYSPDTVRGRFTISRDNAKNSLYLQMNSLRAEDTAVYYCARDSNWDALDYWGCGTTVTVSSGGGGSGGGGSGGGGSDIQMTQSPSSLSASVGDRVTITCKAREKLWSAVAWYQQKPGKCPKALIYSASFRYSGVPSRFSGSGSGTDFTLTISSLQPEDFATYYCQQYYTYPYTFGGGTKVEIK

SEQ ID NO: 329 - protein, 659 aa, Artificial Sequence
  Description of Artificial Sequence: Synthetic polypeptide
VPRDCGCKPCICTVPEVSSVFIFPPKPKDVLTITLTPKVTCVVVDISKDDPEVQFSWFVDDVEVHTAQTQPREEQFNSTFRSVSELPIMHQDWLNGKEFKCRVNSAAFPAPIEKTISKTKGRPKAPQVYTIPPPKEQMAKDKVSLTCMITDFFPEDITVEWQWNGQPAENYKNTQPIMDTDGSYFVYSKLNVQKSNWEAGNTFTCSVLHEGLHNHHTEKSLSHSPGKSGGPGPAGLYAQPGSAPTSSSTKKTQLQLEHLLLDLQMILNGINNYKNPKLTRMLTFKFYMPKKATELKHLQCLEEELKPLEEVLNLAQSKNFHLRPRDLISNINVIVLELKGSETTFMCEYADETATIVEFLNRWITFCQSIISTLTGGGGSGGGGSGGGGSGGGGSGGGGSGGGGSSGGPGPAGLYAQPGSEVQLVESGGGLVQPGGSLRLSCAASGFTFSSYTLAWVRQAPGKCLEWVAAIDSSSYTYSPDTVRGRFTISRDNAKNSLYLQMNSLRAEDTAVYYCARDSNWDALDYWGQGTTVTVSSGGGGSGGGGSGGGGSDIQMTQSPSSLSASVGDRVTITCKVTEKVWGNVAWYQQKPGKAPISLIYSPSLRKSGVPSRFSGSGSGTDFTLTISSLQPEDFATYYCQQYYTYPYTFGCGTKVEIK

SEQ ID NO: 330 - protein, 659 aa, Artificial Sequence
  Description of Artificial Sequence: Synthetic polypeptide
VPRDCGCKPCICTVPEVSSVFIFPPKPKDVLTITLTPKVTCVVVDISKDDPEVQFSWFVDDVEVHTAQTQPREEQFNSTFRSVSELPIMHQDWLNGKEFKCRVNSAAFPAPIEKTISKTKGRPKAPQVYTIPPPKEQMAKDKVSLTCMITDFFPEDITVEWQWNGQPAENYKNTQPIMDTDGSYFVYSKLNVQKSNWEAGNTFTCSVLHEGLHNHHTEKSLSHSPGKSGGPGPAGLYAQPGSAPTSSSTKKTQLQLEHLLLDLQMILNGINNYKNPKLTRMLTFKFYMPKKATELKHLQCLEEELKPLEEVLNLAQSKNFHLRPRDLISNINVIVLELKGSETTFMCEYADETATIVEFLNRWITFCQSIISTLTGGGGSGGGGSGGGGSGGGGSGGGGSGGGGSSGGPGPAGLYAQPGSEVQLVESGGGLVQPGGSLRLSCAASGFTFSSYTLAWVRQAPGKGLEWVAAIDSSSYTYSPDTVRGRFTISRDNAKNSLYLQMNSLRAEDTAVYYCARDSNWDALDYWGCGTTVTVSSGGGGSGGGGSGGGGSDIQMTQSPSSLSASVGDRVTITCKVTEKVWGNVAWYQQKPGKCPISLIYSPSLRKSGVPSRFSGSGSGTDFTLTISSLQPEDFATYYCQQYYTYPYTFGGGTKVEIK

SEQ ID NO: 331 - protein, 539 aa, Artificial Sequence
  Description of Artificial Sequence: Synthetic polypeptide
VPRDCGCKPCICTVPEVSSVFIFPPKPKDVLTITLTPKVTCVVVDISKDDPEVQFSWFVDDVEVHTAQTQPREEQFNSTFRSVSELPIMHQDWLNGKEFKCRVNSAAFPAPIEKTISKTKGRPKAPQVYTIPPPKEQMAKDKVSLTCMITDFFPEDITVEWQWNGQPAENYKNTQPIMDTDGSYFVYSKLNVQKSNWEAGNTFTCSVLHEGLHNHHTEKSLSHSPGKSGGPGPAGLYAQPGSAPTSSSTKKTQLQLEHLLLDLQMILNGINNYKNPKLTRMLTFKFYMPKKATELKHLQCLEEELKPLEEVLNLAQSKNFHLRPRDLISNINVIVLELKGSETTFMCEYADETATIVEFLNRWITFCQSIISTLTGGGGSGGGGSGGGGSGGGGSGGGGSGGGGSSGGPGPAGLYAQPGSEVQLLESGGGLVQPGGSLRLSCAASGSIFSANAMGWYRQAPGKQRELVAVISSGGSTNYADSVKGRFTISRDNSKNTVYLQMNSLRAEDTAVYYCMYSGSYYYTPNDYWGQGTLVTVSS

SEQ ID NO: 332 - protein, 463 aa, Artificial Sequence
  Description of Artificial Sequence: Synthetic polypeptide
ELCDDDPPEIPHATFKAMAYKEGTMLNCECKRGFRRIKSGSLYMLCTGNSSHSSWDNQCQCTSSATRNTTKQVTPQPEEQKERKTTEMQSPMQPVDQASLPGHCREPPPWENEATERIYHFVVGQMVYYQCVQGYRALHRGPAESVCKMTHGKTRWTQPQLICTGEMETSQFPGEEKPQASPEGRPESETSSLVTTTDFQIQTEMAATMETSIFTTEYQGGGGSGGGGSGGGGSGGGGSGGGGSGGGGSDIQMTQSPSSLSASVGDRVTITCKAREKLWSAVAWYQQKPGKAPKSLIYSASFRYSGVPSRFSGSGSGTDFTLTISSLQPEDFATYYCQQYYTYPYTFGGGTKVEIKRTVAAPSVFIFPPSDEQLKSGTASVVCLLNNFYPREAKVQWKVDNALQSGNSQESVTEQDSKDSTYSLSSTLTLSKADYEKHKVYACEVTHQGLSSPVTKSFNRGEC

SEQ ID NO: 333 - protein, 463 aa, Artificial Sequence
  Description of Artificial Sequence: Synthetic polypeptide
ELCDDDPPEIPHATFKAMAYKEGTMLNCECKRGFRRIKSGSLYMLCTGNSSHSSWDNQCQCTSSATRNTTKQVTPQPEEQKERKTTEMQSPMQPVDQASLPGHCREPPPWENEATERIYHFVVGQMVYYQCVQGYRALHRGPAESVCKMTHGKTRWTQPQLICTGEMETSQFPGEEKPQASPEGRPESETSSLVTTTDFQIQTEMAATMETSIFTTEYQGGGGSGGGGSGGGGSGGGGSGGGGSGGGGSDIQMTQSPSSLSASVGDRVTITCKVTEKVWGNVAWYQQKPGKAPISLIYSPSLRKSGVPSRFSGSGSGTDFTLTISSLQPEDFATYYCQQYYTYPYTFGGGTKVEIKRTVAAPSVFIFPPSDEQLKSGTASVVCLLNNFYPREAKVQWKVDNALQSGNSQESVTEQDSKDSTYSLSSTLTLSKADYEKHKVYACEVTHQGLSSPVTKSFNRGEC

SEQ ID NO: 334 - protein, 811 aa, Artificial Sequence
  Description of Artificial Sequence: Synthetic polypeptide
APTSSSTKKTQLQLEHLLLDLQMILNGINNYKNPKLTRMLTFKFYMPKKATELKHLQCLEEELKPLEEVLNLAQSKNFHLRPRDLISNINVIVLELKGSETTFMCEYADETATIVEFLNRWITFCQSIISTLTSGGPGPAGLYAQPGSGGGGSGGGGSGGGGSGGGGSGGGGSGGGGSEVQLVESGGGLVQPGGSLRLSCAASGFTFSSYTLAWVRQAPGKCLEWVAAIDSSSYTYSPDTVRGRFTISRDNAKNSLYLQMNSLRAEDTAVYYCARDSNWDALDYWGQGTTVTVSSGGGGSGGGGSGGGGSDIQMTQSPSSLSASVGDRVTITCKAREKLWSAVAWYQQKPGKAPKSLIYSASFRYSGVPSRFSGSGSGTDFTLTISSLQPEDFATYYCQQYYTYPYTFGCGTKVEIKGGGGSGGGGSGGGGSGGGGSGGGGSGGGGSGGGGSGGGGSGGGGSELCDDDPPEIPHATFKAMAYKEGTMLNCECKRGFRRIKSGSLYMLCTGNSSHSSWDNQCQCTSSATRNTTKQVTPQPEEQKERKTTEMQSPMQPVDQASLPGHCREPPPWENEATERIYHFVVGQMVYYQCVQGYRALHRGPAESVCKMTHGKTRWTQPQLICTGEMETSQFPGEEKPQASPEGRPESETSSLVTTTDFQIQTEMAATMETSIFTTEYQSGGPGPAGLYAQPGSEVQLVESGGGLVQPGNSLRLSCAASGFTFSKFGMSWVRQAPGKGLEWVSSISGSGRDTLYAESVKGRFTISRDNAKTTLYLQMNSLRPEDTAVYYCTIGGSLSVSSQGTLVTVSS

SEQ ID NO: 335 - protein, 811 aa, Artificial Sequence
  Description of Artificial Sequence: Synthetic polypeptide
APTSSSTKKTQLQLEHLLLDLQMILNGINNYKNPKLTRMLTFKFYMPKKATELKHLQCLEEELKPLEEVLNLAQSKNFHLRPRDLISNINVIVLELKGSETTFMCEYADETATIVEFLNRWITFCQSIISTLTSGGPGPAGLYAQPGSGGGGSGGGGSGGGGSGGGGSGGGGSGGGGSEVQLVESGGGLVQPGGSLRLSCAASGFTFSSYTLAWVRQAPGKGLEWVAAIDSSSYTYSPDTVRGRFTISRDNAKNSLYLQMNSLRAEDTAVYYCARDSNWDALDYWGCGTTVTVSSGGGGSGGGGSGGGGSDIQMTQSPSSLSASVGDRVTITCKAREKLWSAVAWYQQKPGKCPKALIYSASFRYSGVPSRFSGSGSGTDFTLTISSLQPEDFATYYCQQYYTYPYTFGGGTKVEIKGGGGSGGGGSGGGGSGGGGSGGGGSGGGGSGGGGSGGGGSGGGGSELCDDDPPEIPHATFKAMAYKEGTMLNCECKRGFRRIKSGSLYMLCTGNSSHSSWDNQCQCTSSATRNTTKQVTPQPEEQKERKTTEMQSPMQPVDQASLPGHCREPPPWENEATERIYHFVVGQMVYYQCVQGYRALHRGPAESVCKMTHGKTRWTQPQLICTGEMETSQFPGEEKPQASPEGRPESETSSLVTTTDFQIQTEMAATMETSIFTTEYQSGGPGPAGLYAQPGSEVQLVESGGGLVQPGNSLRLSCAASGFTFSKFGMSWVRQAPGKGLEWVSSISGSGRDTLYAESVKGRFTISRDNAKTTLYLQMNSLRPEDTAVYYCTIGGSLSVSSQGTLVTVSS

SEQ ID NO: 336 - protein, 811 aa, Artificial Sequence
  Description of Artificial Sequence: Synthetic polypeptide
APTSSSTKKTQLQLEHLLLDLQMILNGINNYKNPKLTRMLTFKFYMPKKATELKHLQCLEEELKPLEEVLNLAQSKNFHLRPRDLISNINVIVLELKGSETTFMCEYADETATIVEFLNRWITFCQSIISTLTSGGPGPAGLYAQPGSGGGGSGGGGSGGGGSGGGGSGGGGSGGGGSEVQLVESGGGLVQPGGSLRLSCAASGFTFSSYTLAWVRQAPGKCLEWVAAIDSSSYTYSPDTVRGRFTISRDNAKNSLYLQMNSLRAEDTAVYYCARDSNWDALDYWGQGTTVTVSSGGGGSGGGGSGGGGSDIQMTQSPSSLSASVGDRVTITCKVTEKVWGNVAWYQQKPGKAPISLIYSPSLRKSGVPSRFSGSGSGTDFTLTISSLQPEDFATYYCQQYYTYPYTFGCGTKVEIKGGGGSGGGGSGGGGSGGGGSGGGGSGGGGSGGGGSGGGGSGGGGSELCDDDPPEIPHATFKAMAYKEGTMLNCECKRGFRRIKSGSLYMLCTGNSSHSSWDNQCQCTSSATRNTTKQVTPQPEEQKERKTTEMQSPMQPVDQASLPGHCREPPPWENEATERIYHFVVGQMVYYQCVQGYRALHRGPAESVCKMTHGKTRWTQPQLICTGEMETSQFPGEEKPQASPEGRPESETSSLVTTTDFQIQTEMAATMETSIFTTEYQSGGPGPAGLYAQPGSEVQLVESGGGLVQPGNSLRLSCAASGFTFSKFGMSWVRQAPGKGLEWVSSISGSGRDTLYAESVKGRFTISRDNAKTTLYLQMNSLRPEDTAVYYCTIGGSLSVSSQGTLVTVSS

SEQ ID NO: 337 - protein, 811 aa, Artificial Sequence
  Description of Artificial Sequence: Synthetic polypeptide
APTSSSTKKTQLQLEHLLLDLQMILNGINNYKNPKLTRMLTFKFYMPKKATELKHLQCLEEELKPLEEVLNLAQSKNFHLRPRDLISNINVIVLELKGSETTFMCEYADETATIVEFLNRWITFCQSIISTLTSGGPGPAGLYAQPGSGGGGSGGGGSGGGGSGGGGSGGGGSGGGGSEVQLVESGGGLVQPGGSLRLSCAASGFTFSSYTLAWVRQAPGKGLEWVAAIDSSSYTYSPDTVRGRFTISRDNAKNSLYLQMNSLRAEDTAVYYCARDSNWDALDYWGCGTTVTVSSGGGGSGGGGSGGGGSDIQMTQSPSSLSASVGDRVTITCKVTEKVWGNVAWYQQKPGKCPISLIYSPSLRKSGVPSRFSGSGSGTDFTLTISSLQPEDFATYYCQQYYTYPYTFGGGTKVEIKGGGGSGGGGSGGGGSGGGGSGGGGSGGGGSGGGGSGGGGSGGGGSELCDDDPPEIPHATFKAMAYKEGTMLNCECKRGFRRIKSGSLYMLCTGNSSHSSWDNQCQCTSSATRNTTKQVTPQPEEQKERKTTEMQSPMQPVDQASLPGHCREPPPWENEATERIYHFVVGQMVYYQCVQGYRALHRGPAESVCKMTHGKTRWTQPQLICTGEMETSQFPGEEKPQASPEGRPESETSSLVTTTDFQIQTEMAATMETSIFTTEYQSGGPGPAGLYAQPGSEVQLVESGGGLVQPGNSLRLSCAASGFTFSKFGMSWVRQAPGKGLEWVSSISGSGRDTLYAESVKGRFTISRDNAKTTLYLQMNSLRPEDTAVYYCTIGGSLSVSSQGTLVTVSS

SEQ ID NO: 338 - protein, 691 aa, Artificial Sequence
  Description of Artificial Sequence: Synthetic polypeptide
APTSSSTKKTQLQLEHLLLDLQMILNGINNYKNPKLTRMLTFKFYMPKKATELKHLQCLEEELKPLEEVLNLAQSKNFHLRPRDLISNINVIVLELKGSETTFMCEYADETATIVEFLNRWITFCQSIISTLTSGGPGPAGLYAQPGSGGGGSGGGGSGGGGSGGGGSGGGGSGGGGSEVQLLESGGGLVQPGGSLRLSCAASGSIFSANAMGWYRQAPGKQRELVAVISSGGSTNYADSVKGRFTISRDNSKNTVYLQMNSLRAEDTAVYYCMYSGSYYYTPNDYWGQGTLVTVSSGGGGSGGGGSGGGGSGGGGSGGGGSGGGGSGGGGSGGGGSGGGGSELCDDDPPEIPHATFKAMAYKEGTMLNCECKRGFRRIKSGSLYMLCTGNSSHSSWDNQCQCTSSATRNTTKQVTPQPEEQKERKTTEMQSPMQPVDQASLPGHCREPPPWENEATERIYHFVVGQMVYYQCVQGYRALHRGPAESVCKMTHGKTRWTQPQLICTGEMETSQFPGEEKPQASPEGRPESETSSLVTTTDFQIQTEMAATMETSIFTTEYQSGGPGPAGLYAQPGSEVQLVESGGGLVQPGNSLRLSCAASGFTFSKFGMSWVRQAPGKGLEWVSSISGSGRDTLYAESVKGRFTISRDNAKTTLYLQMNSLRPEDTAVYYCTIGGSLSVSSQGTLVTVSS

SEQ ID NO: 339 - protein, 691 aa, Artificial Sequence
  Description of Artificial Sequence: Synthetic polypeptide
APTSSSTKKTQLQLEHLLLDLQMILNGINNYKNPKLTRMLTFKFYMPKKATELKHLQCLEEELKPLEEVLNLAQSKNFHLRPRDLISNINVIVLELKGSETTFMCEYADETATIVEFLNRWITFCQSIISTLTSGGPGPAGLYAQPGSGGGGSGGGGSGGGGSGGGGSGGGGSGGGGSEVQLLESGGGLVQPGGSLRLSCAASGSIFSANAMGWYRQAPGKGLELVAVISSGGSTNYADSVKGRFTISRDNSKNTVYLQMNSLRAEDTAVYYCMYSGSYYYTPNDYWGQGTLVTVSSGGGGSGGGGSGGGGSGGGGSGGGGSGGGGSGGGGSGGGGSGGGGSELCDDDPPEIPHATFKAMAYKEGTMLNCECKRGFRRIKSGSLYMLCTGNSSHSSWDNQCQCTSSATRNTTKQVTPQPEEQKERKTTEMQSPMQPVDQASLPGHCREPPPWENEATERIYHFVVGQMVYYQCVQGYRALHRGPAESVCKMTHGKTRWTQPQLICTGEMETSQFPGEEKPQASPEGRPESETSSLVTTTDFQIQTEMAATMETSIFTTEYQSGGPGPAGLYAQPGSEVQLVESGGGLVQPGNSLRLSCAASGFTFSKFGMSWVRQAPGKGLEWVSSISGSGRDTLYAESVKGRFTISRDNAKTTLYLQMNSLRPEDTAVYYCTIGGSLSVSSQGTLVTVSS

SEQ ID NO: 340 - protein, 811 aa, Artificial Sequence
  Description of Artificial Sequence: Synthetic polypeptide
EVQLVESGGGLVQPGNSLRLSCAASGFTFSKFGMSWVRQAPGKGLEWVSSISGSGRDTLYAESVKGRFTISRDNAKTTLYLQMNSLRPEDTAVYYCTIGGSLSVSSQGTLVTVSSSGGPGPAGLYAQPGSEVQLVESGGGLVQPGGSLRLSCAASGFTFSSYTLAWVRQAPGKCLEWVAAIDSSSYTYSPDTVRGRFTISRDNAKNSLYLQMNSLRAEDTAVYYCARDSNWDALDYWGQGTTVTVSSGGGGSGGGGSGGGGSDIQMTQSPSSLSASVGDRVTITCKAREKLWSAVAWYQQKPGKAPKSLIYSASFRYSGVPSRFSGSGSGTDFTLTISSLQPEDFATYYCQQYYTYPYTFGCGTKVEIKGGGGSGGGGSGGGGSGGGGSGGGGSGGGGSGGGGSGGGGSGGGGSELCDDDPPEIPHATFKAMAYKEGTMLNCECKRGFRRIKSGSLYMLCTGNSSHSSWDNQCQCTSSATRNTTKQVTPQPEEQKERKTTEMQSPMQPVDQASLPGHCREPPPWENEATERIYHFVVGQMVYYQCVQGYRALHRGPAESVCKMTHGKTRWTQPQLICTGEMETSQFPGEEKPQASPEGRPESETSSLVTTTDFQIQTEMAATMETSIFTTEYQGGGGSGGGGSGGGGSGGGGSGGGGSGGGGSSGGPGPAGLYAQPGSAPTSSSTKKTQLQLEHLLLDLQMILNGINNYKNPKLTRMLTFKFYMPKKATELKHLQCLEEELKPLEEVLNLAQSKNFHLRPRDLISNINVIVLELKGSETTFMCEYADETATIVEFLNRWITFCQSIISTLT

SEQ ID NO: 341 - protein, 811 aa, Artificial Sequence
  Description of Artificial Sequence: Synthetic polypeptide
EVQLVESGGGLVQPGNSLRLSCAASGFTFSKFGMSWVRQAPGKGLEWVSSISGSGRDTLYAESVKGRFTISRDNAKTTLYLQMNSLRPEDTAVYYCTIGGSLSVSSQGTLVTVSSSGGPGPAGLYAQPGSEVQLVESGGGLVQPGGSLRLSCAASGFTFSSYTLAWVRQAPGKGLEWVAAIDSSSYTYSPDTVRGRFTISRDNAKNSLYLQMNSLRAEDTAVYYCARDSNWDALDYWGCGTTVTVSSGGGGSGGGGSGGGGSDIQMTQSPSSLSASVGDRVTITCKAREKLWSAVAWYQQKPGKCPKALIYSASFRYSGVPSRFSGSGSGTDFTLTISSLQPEDFATYYCQQYYTYPYTFGGGTKVEIKGGGGSGGGGSGGGGSGGGGSGGGGSGGGGSGGGGSGGGGSGGGGSELCDDDPPEIPHATFKAMAYKEGTMLNCECKRGFRRIKSGSLYMLCTGNSSHSSWDNQCQCTSSATRNTTKQVTPQPEEQKERKTTEMQSPMQPVDQASLPGHCREPPPWENEATERIYHFVVGQMVYYQCVQGYRALHRGPAESVCKMTHGKTRWTQPQLICTGEMETSQFPGEEKPQASPEGRPESETSSLVTTTDFQIQTEMAATMETSIFTTEYQGGGGSGGGGSGGGGSGGGGSGGGGSGGGGSSGGPGPAGLYAQPGSAPTSSSTKKTQLQLEHLLLDLQMILNGINNYKNPKLTRMLTFKFYMPKKATELKHLQCLEEELKPLEEVLNLAQSKNFHLRPRDLISNINVIVLELKGSETTFMCEYADETATIVEFLNRWITFCQSIISTLT

SEQ ID NO: 342 - protein, 811 aa, Artificial Sequence
  Description of Artificial Sequence: Synthetic polypeptide
EVQLVESGGGLVQPGNSLRLSCAASGFTFSKFGMSWVRQAPGKGLEWVSSISGSGRDTLYAESVKGRFTISRDNAKTTLYLQMNSLRPEDTAVYYCTIGGSLSVSSQGTLVTVSSSGGPGPAGLYAQPGSEVQLVESGGGLVQPGGSLRLSCAASGFTFSSYTLAWVRQAPGKCLEWVAAIDSSSYTYSPDTVRGRFTISRDNAKNSLYLQMNSLRAEDTAVYYCARDSNWDALDYWGQGTTVTVSSGGGGSGGGGSGGGGSDIQMTQSPSSLSASVGDRVTITCKVTEKVWGNVAWYQQKPGKAPISLIYSPSLRKSGVPSRFSGSGSGTDFTLTISSLQPEDFATYYCQQYYTYPYTFGCGTKVEIKGGGGSGGGGSGGGGSGGGGSGGGGSGGGGSGGGGSGGGGSGGGGSELCDDDPPEIPHATFKAMAYKEGTMLNCECKRGFRRIKSGSLYMLCTGNSSHSSWDNQCQCTSSATRNTTKQVTPQPEEQKERKTTEMQSPMQPVDQASLPGHCREPPPWENEATERIYHFVVGQMVYYQCVQGYRALHRGPAESVCKMTHGKTRWTQPQLICTGEMETSQFPGEEKPQASPEGRPESETSSLVTTTDFQIQTEMAATMETSIFTTEYQGGGGSGGGGSGGGGSGGGGSGGGGSGGGGSSGGPGPAGLYAQPGSAPTSSSTKKTQLQLEHLLLDLQMILNGINNYKNPKLTRMLTFKFYMPKKATELKHLQCLEEELKPLEEVLNLAQSKNFHLRPRDLISNINVIVLELKGSETTFMCEYADETATIVEFLNRWITFCQSIISTLT

SEQ ID NO: 343 - protein, 811 aa, Artificial Sequence
  Description of Artificial Sequence: Synthetic polypeptide
EVQLVESGGGLVQPGNSLRLSCAASGFTFSKFGMSWVRQAPGKGLEWVSSISGSGRDTLYAESVKGRFTISRDNAKTTLYLQMNSLRPEDTAVYYCTIGGSLSVSSQGTLVTVSSSGGPGPAGLYAQPGSEVQLVESGGGLVQPGGSLRLSCAASGFTFSSYTLAWVRQAPGKGLEWVAAIDSSSYTYSPDTVRGRFTISRDNAKNSLYLQMNSLRAEDTAVYYCARDSNWDALDYWGCGTTVTVSSGGGGSGGGGSGGGGSDIQMTQSPSSLSASVGDRVTITCKVTEKVWGNVAWYQQKPGKCPISLIYSPSLRKSGVPSRFSGSGSGTDFTLTISSLQPEDFATYYCQQYYTYPYTFGGGTKVEIKGGGGSGGGGSGGGGSGGGGSGGGGSGGGGSGGGGSGGGGSGGGGSELCDDDPPEIPHATFKAMAYKEGTMLNCECKRGFRRIKSGSLYMLCTGNSSHSSWDNQCQCTSSATRNTTKQVTPQPEEQKERKTTEMQSPMQPVDQASLPGHCREPPPWENEATERIYHFVVGQMVYYQCVQGYRALHRGPAESVCKMTHGKTRWTQPQLICTGEMETSQFPGEEKPQASPEGRPESETSSLVTTTDFQIQTEMAATMETSIFTTEYQGGGGSGGGGSGGGGSGGGGSGGGGSGGGGSSGGPGPAGLYAQPGSAPTSSSTKKTQLQLEHLLLDLQMILNGINNYKNPKLTRMLTFKFYMPKKATELKHLQCLEEELKPLEEVLNLAQSKNFHLRPRDLISNINVIVLELKGSETTFMCEYADETATIVEFLNRWITFCQSIISTLT

SEQ ID NO: 344 - protein, 691 aa, Artificial Sequence
  Description of Artificial Sequence: Synthetic polypeptide
EVQLVESGGGLVQPGNSLRLSCAASGFTFSKFGMSWVRQAPGKGLEWVSSISGSGRDTLYAESVKGRFTISRDNAKTTLYLQMNSLRPEDTAVYYCTIGGSLSVSSQGTLVTVSSSGGPGPAGLYAQPGSEVQLLESGGGLVQPGGSLRLSCAASGSIFSANAMGWYRQAPGKQRELVAVISSGGSTNYADSVKGRFTISRDNSKNTVYLQMNSLRAEDTAVYYCMYSGSYYYTPNDYWGQGTLVTVSSGGGGSGGGGSGGGGSGGGGSGGGGSGGGGSGGGGSGGGGSGGGGSELCDDDPPEIPHATFKAMAYKEGTMLNCECKRGFRRIKSGSLYMLCTGNSSHSSWDNQCQCTSSATRNTTKQVTPQPEEQKERKTTEMQSPMQPVDQASLPGHCREPPPWENEATERIYHFVVGQMVYYQCVQGYRALHRGPAESVCKMTHGKTRWTQPQLICTGEMETSQFPGEEKPQASPEGRPESETSSLVTTTDFQIQTEMAATMETSIFTTEYQGGGGSGGGGSGGGGSGGGGSGGGGSGGGGSSGGPGPAGLYAQPGSAPTSSSTKKTQLQLEHLLLDLQMILNGINNYKNPKLTRMLTFKFYMPKKATELKHLQCLEEELKPLEEVLNLAQSKNFHLRPRDLISNINVIVLELKGSETTFMCEYADETATIVEFLNRWITFCQSIISTLT

SEQ ID NO: 345 - protein, 691 aa, Artificial Sequence
  Description of Artificial Sequence: Synthetic polypeptide
EVQLVESGGGLVQPGNSLRLSCAASGFTFSKFGMSWVRQAPGKGLEWVSSISGSGRDTLYAESVKGRFTISRDNAKTTLYLQMNSLRPEDTAVYYCTIGGSLSVSSQGTLVTVSSSGGPGPAGLYAQPGSEVQLLESGGGLVQPGGSLRLSCAASGSIFSANAMGWYRQAPGKGLELVAVISSGGSTNYADSVKGRFTISRDNSKNTVYLQMNSLRAEDTAVYYCMYSGSYYYTPNDYWGQGTLVTVSSGGGGSGGGGSGGGGSGGGGSGGGGSGGGGSGGGGSGGGGSGGGGSELCDDDPPEIPHATFKAMAYKEGTMLNCECKRGFRRIKSGSLYMLCTGNSSHSSWDNQCQCTSSATRNTTKQVTPQPEEQKERKTTEMQSPMQPVDQASLPGHCREPPPWENEATERIYHFVVGQMVYYQCVQGYRALHRGPAESVCKMTHGKTRWTQPQLICTGEMETSQFPGEEKPQASPEGRPESETSSLVTTTDFQIQTEMAATMETSIFTTEYQGGGGSGGGGSGGGGSGGGGSGGGGSGGGGSSGGPGPAGLYAQPGSAPTSSSTKKTQLQLEHLLLDLQMILNGINNYKNPKLTRMLTFKFYMPKKATELKHLQCLEEELKPLEEVLNLAQSKNFHLRPRDLISNINVIVLELKGSETTFMCEYADETATIVEFLNRWITFCQSIISTLT

SEQ ID NO: 346 - protein, 696 aa, Artificial Sequence
  Description of Artificial Sequence: Synthetic polypeptide
APTSSSTKKTQLQLEHLLLDLQMILNGINNYKNPKLTRMLTFKFYMPKKATELKHLQCLEEELKPLEEVLNLAQSKNFHLRPRDLISNINVIVLELKGSETTFMCEYADETATIVEFLNRWITFCQSIISTLTSGGPGPAGLYAQPGSEVQLVESGGGLVQPGNSLRLSCAASGFTFSKFGMSWVRQAPGKGLEWVSSISGSGRDTLYAESVKGRFTISRDNAKTTLYLQMNSLRPEDTAVYYCTIGGSLSVSSQGTLVTVSSGGGGSGGGGSGGGGSGGGGSGGGGSGGGGSSGGPGPAGLYAQPGSEVQLVESGGGLVQPGGSLRLSCAASGFTFSSYTLAWVRQAPGKCLEWVAAIDSSSYTYSPDTVRGRFTISRDNAKNSLYLQMNSLRAEDTAVYYCARDSNWDALDYWGQGTTVTVSSGGGGSGGGGSGGGGSDIQMTQSPSSLSASVGDRVTITCKAREKLWSAVAWYQQKPGKAPKSLIYSASFRYSGVPSRFSGSGSGTDFTLTISSLQPEDFATYYCQQYYTYPYTFGCGTKVEIKGGGGSGGGGSGGGGSGGGGSGGGGSGGGGSEVQLLESGGGLVQPGGSLRLSCAASGSIFSANAMGWYRQAPGKQRELVAVISSGGSTNYADSVKGRFTISRDNSKNTVYLQMNSLRAEDTAVYYCMYSGSYYYTPNDYWGQGTLVTVSS

SEQ ID NO: 347 - protein, 696 aa, Artificial Sequence
  Description of Artificial Sequence: Synthetic polypeptide
APTSSSTKKTQLQLEHLLLDLQMILNGINNYKNPKLTRMLTFKFYMPKKATELKHLQCLEEELKPLEEVLNLAQSKNFHLRPRDLISNINVIVLELKGSETTFMCEYADETATIVEFLNRWITFCQSIISTLTSGGPGPAGLYAQPGSEVQLVESGGGLVQPGNSLRLSCAASGFTFSKFGMSWVRQAPGKGLEWVSSISGSGRDTLYAESVKGRFTISRDNAKTTLYLQMNSLRPEDTAVYYCTIGGSLSVSSQGTLVTVSSGGGGSGGGGSGGGGSGGGGSGGGGSGGGGSSGGPGPAGLYAQPGSEVQLVESGGGLVQPGGSLRLSCAASGFTFSSYTLAWVRQAPGKGLEWVAAIDSSSYTYSPDTVRGRFTISRDNAKNSLYLQMNSLRAEDTAVYYCARDSNWDALDYWGCGTTVTVSSGGGGSGGGGSGGGGSDIQMTQSPSSLSASVGDRVTITCKAREKLWSAVAWYQQKPGKCPKALIYSASFRYSGVPSRFSGSGSGTDFTLTISSLQPEDFATYYCQQYYTYPYTFGGGTKVEIKGGGGSGGGGSGGGGSGGGGSGGGGSGGGGSEVQLLESGGGLVQPGGSLRLSCAASGSIFSANAMGWYRQAPGKQRELVAVISSGGSTNYADSVKGRFTISRDNSKNTVYLQMNSLRAEDTAVYYCMYSGSYYYTPNDYWGQGTLVTVSS

SEQ ID NO: 348 - protein, 696 aa, Artificial Sequence
  Description of Artificial Sequence: Synthetic polypeptide
APTSSSTKKTQLQLEHLLLDLQMILNGINNYKNPKLTRMLTFKFYMPKKATELKHLQCLEEELKPLEEVLNLAQSKNFHLRPRDLISNINVIVLELKGSETTFMCEYADETATIVEFLNRWITFCQSIISTLTSGGPGPAGLYAQPGSEVQLVESGGGLVQPGNSLRLSCAASGFTFSKFGMSWVRQAPGKGLEWVSSISGSGRDTLYAESVKGRFTISRDNAKTTLYLQMNSLRPEDTAVYYCTIGGSLSVSSQGTLVTVSSGGGGSGGGGSGGGGSGGGGSGGGGSGGGGSSGGPGPAGLYAQPGSEVQLVESGGGLVQPGGSLRLSCAASGFTFSSYTLAWVRQAPGKCLEWVAAIDSSSYTYSPDTVRGRFTISRDNAKNSLYLQMNSLRAEDTAVYYCARDSNWDALDYWGQGTTVTVSSGGGGSGGGGSGGGGSDIQMTQSPSSLSASVGDRVTITCKVTEKVWGNVAWYQQKPGKAPISLIYSPSLRKSGVPSRFSGSGSGTDFTLTISSLQPEDFATYYCQQYYTYPYTFGCGTKVEIKGGGGSGGGGSGGGGSGGGGSGGGGSGGGGSEVQLLESGGGLVQPGGSLRLSCAASGSIFSANAMGWYRQAPGKQRELVAVISSGGSTNYADSVKGRFTISRDNSKNTVYLQMNSLRAEDTAVYYCMYSGSYYYTPNDYWGQGTLVTVSS

SEQ ID NO: 349 - protein, 696 aa, Artificial Sequence
  Description of Artificial Sequence: Synthetic polypeptide
APTSSSTKKTQLQLEHLLLDLQMILNGINNYKNPKLTRMLTFKFYMPKKATELKHLQCLEEELKPLEEVLNLAQSKNFHLRPRDLISNINVIVLELKGSETTFMCEYADETATIVEFLNRWITFCQSIISTLTSGGPGPAGLYAQPGSEVQLVESGGGLVQPGNSLRLSCAASGFTFSKFGMSWVRQAPGKGLEWVSSISGSGRDTLYAESVKGRFTISRDNAKTTLYLQMNSLRPEDTAVYYCTIGGSLSVSSQGTLVTVSSGGGGSGGGGSGGGGSGGGGSGGGGSGGGGSSGGPGPAGLYAQPGSEVQLVESGGGLVQPGGSLRLSCAASGFTFSSYTLAWVRQAPGKGLEWVAAIDSSSYTYSPDTVRGRFTISRDNAKNSLYLQMNSLRAEDTAVYYCARDSNWDALDYWGCGTTVTVSSGGGGSGGGGSGGGGSDIQMTQSPSSLSASVGDRVTITCKVTEKVWGNVAWYQQKPGKCPISLIYSPSLRKSGVPSRFSGSGSGTDFTLTISSLQPEDFATYYCQQYYTYPYTFGGGTKVEIKGGGGSGGGGSGGGGSGGGGSGGGGSGGGGSEVQLLESGGGLVQPGGSLRLSCAASGSIFSANAMGWYRQAPGKQRELVAVISSGGSTNYADSVKGRFTISRDNSKNTVYLQMNSLRAEDTAVYYCMYSGSYYYTPNDYWGQGTLVTVSS

SEQ ID NO: 350 - protein, 696 aa, Artificial Sequence
  Description of Artificial Sequence: Synthetic polypeptide
APTSSSTKKTQLQLEHLLLDLQMILNGINNYKNPKLTRMLTFKFYMPKKATELKHLQCLEEELKPLEEVLNLAQSKNFHLRPRDLISNINVIVLELKGSETTFMCEYADETATIVEFLNRWITFCQSIISTLTSGGPGPAGLYAQPGSEVQLVESGGGLVQPGNSLRLSCAASGFTFSKFGMSWVRQAPGKGLEWVSSISGSGRDTLYAESVKGRFTISRDNAKTTLYLQMNSLRPEDTAVYYCTIGGSLSVSSQGTLVTVSSGGGGSGGGGSGGGGSGGGGSGGGGSGGGGSSGGPGPAGLYAQPGSEVQLVESGGGLVQPGGSLRLSCAASGFTFSSYTLAWVRQAPGKCLEWVAAIDSSSYTYSPDTVRGRFTISRDNAKNSLYLQMNSLRAEDTAVYYCARDSNWDALDYWGQGTTVTVSSGGGGSGGGGSGGGGSDIQMTQSPSSLSASVGDRVTITCKAREKLWSAVAWYQQKPGKAPKSLIYSASFRYSGVPSRFSGSGSGTDFTLTISSLQPEDFATYYCQQYYTYPYTFGCGTKVEIKGGGGSGGGGSGGGGSGGGGSGGGGSGGGGSEVQLLESGGGLVQPGGSLRLSCAASGSIFSANAMGWYRQAPGKGLELVAVISSGGSTNYADSVKGRFTISRDNSKNTVYLQMNSLRAEDTAVYYCMYSGSYYYTPNDYWGQGTLVTVSS

SEQ ID NO: 351 - protein, 696 aa, Artificial Sequence
  Description of Artificial Sequence: Synthetic polypeptide
APTSSSTKKTQLQLEHLLLDLQMILNGINNYKNPKLTRMLTFKFYMPKKATELKHLQCLEEELKPLEEVLNLAQSKNFHLRPRDLISNINVIVLELKGSETTFMCEYADETATIVEFLNRWITFCQSIISTLTSGGPGPAGLYAQPGSEVQLVESGGGLVQPGNSLRLSCAASGFTFSKFGMSWVRQAPGKGLEWVSSISGSGRDTLYAESVKGRFTISRDNAKTTLYLQMNSLRPEDTAVYYCTIGGSLSVSSQGTLVTVSSGGGGSGGGGSGGGGSGGGGSGGGGSGGGGSSGGPGPAGLYAQPGSEVQLVESGGGLVQPGGSLRLSCAASGFTFSSYTLAWVRQAPGKGLEWVAAIDSSSYTYSPDTVRGRFTISRDNAKNSLYLQMNSLRAEDTAVYYCARDSNWDALDYWGCGTTVTVSSGGGGSGGGGSGGGGSDIQMTQSPSSLSASVGDRVTITCKAREKLWSAVAWYQQKPGKCPKALIYSASFRYSGVPSRFSGSGSGTDFTLTISSLQPEDFATYYCQQYYTYPYTFGGGTKVEIKGGGGSGGGGSGGGGSGGGGSGGGGSGGGGSEVQLLESGGGLVQPGGSLRLSCAASGSIFSANAMGWYRQAPGKGLELVAVISSGGSTNYADSVKGRFTISRDNSKNTVYLQMNSLRAEDTAVYYCMYSGSYYYTPNDYWGQGTLVTVSS

SEQ ID NO: 352 - protein, 696 aa, Artificial Sequence
  Description of Artificial Sequence: Synthetic polypeptide
APTSSSTKKTQLQLEHLLLDLQMILNGINNYKNPKLTRMLTFKFYMPKKATELKHLQCLEEELKPLEEVLNLAQSKNFHLRPRDLISNINVIVLELKGSETTFMCEYADETATIVEFLNRWITFCQSIISTLTSGGPGPAGLYAQPGSEVQLVESGGGLVQPGNSLRLSCAASGFTFSKFGMSWVRQAPGKGLEWVSSISGSGRDTLYAESVKGRFTISRDNAKTTLYLQMNSLRPEDTAVYYCTIGGSLSVSSQGTLVTVSSGGGGSGGGGSGGGGSGGGGSGGGGSGGGGSSGGPGPAGLYAQPGSEVQLVESGGGLVQPGGSLRLSCAASGFTFSSYTLAWVRQAPGKCLEWVAAIDSSSYTYSPDTVRGRFTISRDNAKNSLYLQMNSLRAEDTAVYYCARDSNWDALDYWGQGTTVTVSSGGGGSGGGGSGGGGSDIQMTQSPSSLSASVGDRVTITCKVTEKVWGNVAWYQQKPGKAPISLIYSPSLRKSGVPSRFSGSGSGTDFTLTISSLQPEDFATYYCQQYYTYPYTFGCGTKVEIKGGGGSGGGGSGGGGSGGGGSGGGGSGGGGSEVQLLESGGGLVQPGGSLRLSCAASGSIFSANAMGWYRQAPGKGLELVAVISSGGSTNYADSVKGRFTISRDNSKNTVYLQMNSLRAEDTAVYYCMYSGSYYYTPNDYWGQGTLVTVSS

SEQ ID NO: 353 - protein, 696 aa, Artificial Sequence
  Description of Artificial Sequence: Synthetic polypeptide
APTSSSTKKTQLQLEHLLLDLQMILNGINNYKNPKLTRMLTFKFYMPKKATELKHLQCLEEELKPLEEVLNLAQSKNFHLRPRDLISNINVIVLELKGSETTFMCEYADETATIVEFLNRWITFCQSIISTLTSGGPGPAGLYAQPGSEVQLVESGGGLVQPGNSLRLSCAASGFTFSKFGMSWVRQAPGKGLEWVSSISGSGRDTLYAESVKGRFTISRDNAKTTLYLQMNSLRPEDTAVYYCTIGGSLSVSSQGTLVTVSSGGGGSGGGGSGGGGSGGGGSGGGGSGGGGSSGGPGPAGLYAQPGSEVQLVESGGGLVQPGGSLRLSCAASGFTFSSYTLAWVRQAPGKGLEWVAAIDSSSYTYSPDTVRGRFTISRDNAKNSLYLQMNSLRAEDTAVYYCARDSNWDALDYWGCGTTVTVSSGGGGSGGGGSGGGGSDIQMTQSPSSLSASVGDRVTITCKVTEKVWGNVAWYQQKPGKCPISLIYSPSLRKSGVPSRFSGSGSGTDFTLTISSLQPEDFATYYCQQYYTYPYTFGGGTKVEIKGGGGSGGGGSGGGGSGGGGSGGGGSGGGGSEVQLLESGGGLVQPGGSLRLSCAASGSIFSANAMGWYRQAPGKGLELVAVISSGGSTNYADSVKGRFTISRDNSKNTVYLQMNSLRAEDTAVYYCMYSGSYYYTPNDYWGQGTLVTVSS

SEQ ID NO: 354 - protein, 6 aa, Artificial Sequence
  Description of Artificial Sequence: Synthetic 6xHis tag
HHHHHH

SEQ ID NO: 355 - protein, 547 aa, Artificial Sequence
  Description of Artificial Sequence: Synthetic polypeptide
APTSSSTKKTQLQLEHLLLDLQMILNGINNYKNPKLTRMLTFKFYMPKKATELKHLQCLEEELKPLEEVLNLAQSKNFHLRPRDLISNINVIVLELKGSETTFMCEYADETATIVEFLNRWITFCQSIISTLTSGGPGPAGLYAQPGSEVQLVESGGGLVQPGNSLRLSCAASGFTFSKFGMSWVRQAPGKGLEWVSSISGSGRDTLYAESVKGRFTISRDNAKTTLYLQMNSLRPEDTAVYYCTIGGSLSVSSQGTLVTVSSGGGGSGGGGSGGGGSGGGGSGGGGSGGGGSSGGPGPAGLYAQPGSEVQLVESGGGLVQPGGSLRLSCAASGFTFSSYTLAWVRQAPGKCLEWVAAIDSSSYTYSPDTVRGRFTISRDNAKNSLYLQMNSLRAEDTAVYYCARDSNWDALDYWGQGTTVTVSSGGGGSGGGGSGGGGSDIQMTQSPSSLSASVGDRVTITCKASQNVGTNVGWYQQKPGKAPKALIYSASFRYSGVPSRFSGSGSGTDFTLTISSLQPEDFATYYCQQYYTYPYTFGCGTKVEIK

SEQ ID NO: 356 - protein, 547 aa, Artificial Sequence
  Description of Artificial Sequence: Synthetic polypeptide
APTSSSTKKTQLQLEHLLLDLQMILNGINNYKNPKLTRMLTFKFYMPKKATELKHLQCLEEELKPLEEVLNLAQSKNFHLRPRDLISNINVIVLELKGSETTFMCEYADETATIVEFLNRWITFCQSIISTLTSGGPGPAGLYAQPGSEVQLVESGGGLVQPGNSLRLSCAASGFTFSKFGMSWVRQAPGKGLEWVSSISGSGRDTLYAESVKGRFTISRDNAKTTLYLQMNSLRPEDTAVYYCTIGGSLSVSSQGTLVTVSSGGGGSGGGGSGGGGSGGGGSGGGGSGGGGSSGGPGPAGLYAQPGSEVQLVESGGGLVQPGGSLRLSCAASGFTFSSYTLAWVRQAPGKGLEWVAAIDSSSYTYSPDTVRGRFTISRDNAKNSLYLQMNSLRAEDTAVYYCARDSNWDALDYWGCGTTVTVSSGGGGSGGGGSGGGGSDIQMTQSPSSLSASVGDRVTITCKASQNVGTNVGWYQQKPGKCPKALIYSASFRYSGVPSRFSGSGSGTDFTLTISSLQPEDFATYYCQQYYTYPYTFGGGTKVEIK

SEQ ID NO: 357 - protein, 547 aa, Artificial Sequence
  Description of Artificial Sequence: Synthetic polypeptide
APTSSSTKKTQLQLEHLLLDLQMILNGINNYKNPKLTRMLTFKFYMPKKATELKHLQCLEEELKPLEEVLNLAQSKNFHLRPRDLISNINVIVLELKGSETTFMCEYADETATIVEFLNRWITFCQSIISTLTSGGPGPAGLYAQPGSEVQLVESGGGLVQPGNSLRLSCAASGFTFSKFGMSWVRQAPGKGLEWVSSISGSGRDTLYAESVKGRFTISRDNAKTTLYLQMNSLRPEDTAVYYCTIGGSLSVSSQGTLVTVSSGGGGSGGGGSGGGGSGGGGSGGGGSGGGGSSGGPGPAGLYAQPGSEVQLVESGGGLVQPGGSLRLSCAASGFTFSSYTLAWVRQAPGKCLEWVAAIDSSSYTYSPDTVRGRFTISRDNAKNSLYLQMNSLRAEDTAVYYCARDSNWDALDYWGQGTTVTVSSGGGGSGGGGSGGGGSDIQMTQSPSSLSASVGDRVTITCKAREKLWSAVAWYQQKPGKAPKALIYSASFRYSGVPSRFSGSGSGTDFTLTISSLQPEDFATYYCQQYYTYPYTFGCGTKVEIK

SEQ ID NO: 358 - protein, 547 aa, Artificial Sequence
  Description of Artificial Sequence: Synthetic polypeptide
APTSSSTKKTQLQLEHLLLDLQMILNGINNYKNPKLTRMLTFKFYMPKKATELKHLQCLEEELKPLEEVLNLAQSKNFHLRPRDLISNINVIVLELKGSETTFMCEYADETATIVEFLNRWITFCQSIISTLTSGGPGPAGLYAQPGSEVQLVESGGGLVQPGNSLRLSCAASGFTFSKFGMSWVRQAPGKGLEWVSSISGSGRDTLYAESVKGRFTISRDNAKTTLYLQMNSLRPEDTAVYYCTIGGSLSVSSQGTLVTVSSGGGGSGGGGSGGGGSGGGGSGGGGSGGGGSSGGPGPAGLYAQPGSEVQLVESGGGLVQPGGSLRLSCAASGFTFSSYTLAWVRQAPGKGLEWVAAIDSSSYTYSPDTVRGRFTISRDNAKNSLYLQMNSLRAEDTAVYYCARDSNWDALDYWGCGTTVTVSSGGGGSGGGGSGGGGSDIQMTQSPSSLSASVGDRVTITCKAREKLWSAVAWYQQKPGKCPKALIYSASFRYSGVPSRFSGSGSGTDFTLTISSLQPEDFATYYCQQYYTYPYTFGGGTKVEIK

SEQ ID NO: 359 - protein, 547 aa, Artificial Sequence
  Description of Artificial Sequence: Synthetic polypeptide
APTSSSTKKTQLQLEHLLLDLQMILNGINNYKNPKLTRMLTFKFYMPKKATELKHLQCLEEELKPLEEVLNLAQSKNFHLRPRDLISNINVIVLELKGSETTFMCEYADETATIVEFLNRWITFCQSIISTLTSGGPGPAGLYAQPGSEVQLVESGGGLVQPGNSLRLSCAASGFTFSKFGMSWVRQAPGKGLEWVSSISGSGRDTLYAESVKGRFTISRDNAKTTLYLQMNSLRPEDTAVYYCTIGGSLSVSSQGTLVTVSSGGGGSGGGGSGGGGSGGGGSGGGGSGGGGSSGGPGPAGLYAQPGSEVQLVESGGGLVQPGGSLRLSCAASGFTFSSYTLAWVRQAPGKCLEWVAAIDSSSYTYSPDTVRGRFTISRDNAKNSLYLQMNSLRAEDTAVYYCARDSNWDALDYWGQGTTVTVSSGGGGSGGGGSGGGGSDIQMTQSPSSLSASVGDRVTITCKVTEKVWGNVAWYQQKPGKAPISLIYSPSLRKSGVPSRFSGSGSGTDFTLTISSLQPEDFATYYCQQYYTYPYTFGCGTKVEIK

SEQ ID NO: 360 - protein, 547 aa, Artificial Sequence
  Description of Artificial Sequence: Synthetic polypeptide
APTSSSTKKTQLQLEHLLLDLQMILNGINNYKNPKLTRMLTFKFYMPKKATELKHLQCLEEELKPLEEVLNLAQSKNFHLRPRDLISNINVIVLELKGSETTFMCEYADETATIVEFLNRWITFCQSIISTLTSGGPGPAGLYAQPGSEVQLVESGGGLVQPGNSLRLSCAASGFTFSKFGMSWVRQAPGKGLEWVSSISGSGRDTLYAESVKGRFTISRDNAKTTLYLQMNSLRPEDTAVYYCTIGGSLSVSSQGTLVTVSSGGGGSGGGGSGGGGSGGGGSGGGGSGGGGSSGGPGPAGLYAQPGSEVQLVESGGGLVQPGGSLRLSCAASGFTFSSYTLAWVRQAPGKGLEWVAAIDSSSYTYSPDTVRGRFTISRDNAKNSLYLQMNSLRAEDTAVYYCARDSNWDALDYWGCGTTVTVSSGGGGSGGGGSGGGGSDIQMTQSPSSLSASVGDRVTITCKVTEKVWGNVAWYQQKPGKCPISLIYSPSLRKSGVPSRFSGSGSGTDFTLTISSLQPEDFATYYCQQYYTYPYTFGGGTKVEIK

SEQ ID NO: 361 - protein, 427 aa, Artificial Sequence
  Description of Artificial Sequence: Synthetic polypeptide
APTSSSTKKTQLQLEHLLLDLQMILNGINNYKNPKLTRMLTFKFYMPKKATELKHLQCLEEELKPLEEVLNLAQSKNFHLRPRDLISNINVIVLELKGSETTFMCEYADETATIVEFLNRWITFCQSIISTLTSGGPGPAGLYAQPGSEVQLVESGGGLVQPGNSLRLSCAASGFTFSKFGMSWVRQAPGKGLEWVSSISGSGRDTLYAESVKGRFTISRDNAKTTLYLQMNSLRPEDTAVYYCTIGGSLSVSSQGTLVTVSSGGGGSGGGGSGGGGSGGGGSGGGGSGGGGSSGGPGPAGLYAQPGSEVQLLESGGGLVQPGGSLRLSCAASGSIFSANAMGWYRQAPGKQRELVAVISSGGSTNYADSVKGRFTISRDNSKNTVYLQMNSLRAEDTAVYYCMYSGSYYYTPNDYWGQGTLVTVSS

SEQ ID NO: 362 - protein, 528 aa, Artificial Sequence
  Description of Artificial Sequence: Synthetic polypeptide
APTSSSTKKTQLQLEHLLLDLQMILNGINNYKNPKLTRMLTFKFYMPKKATELKHLQCLEEELKPLEEVLNLAQSKNFHLRPRDLISNINVIVLELKGSETTFMCEYADETATIVEFLNRWITFCQSIISTLTSGGPGPAGLYAQPGSEVQLVESGGGLVQPGNSLRLSCAASGFTFSKFGMSWVRQAPGKGLEWVSSISGSGRDTLYAESVKGRFTISRDNAKTTLYLQMNSLRPEDTAVYYCTIGGSLSVSSQGTLVTVSSGGGGSGGGGSGGGGSGGGGSGGGGSGGGGSSGGPGPAGLYAQPGSEVQLVESGGGLVQPGGSLRLSCAASGFTFSSYTLAWVRQAPGKGLEWVAAIDSSSYTYSPDTVRGRFTISRDNAKNSLYLQMNSLRAEDTAVYYCARDSNWDALDYWGQGTTVTVSSASTKGPSVFPLAPSSKSTSGGTAALGCLVKDYFPEPVTVSWNSGALTSGVHTFPAVLQSSGLYSLSSVVTVPSSSLGTQTYICNVNHKPSNTKVDKRVEPKSC

SEQ ID NO: 363 - protein, 642 aa, Artificial Sequence
  Description of Artificial Sequence: Synthetic polypeptide
ESKYGPPCPPCPAPEFLGGPSVFLFPPKPKDTLMISRTPEVTCVVVDVSQEDPEVQFNWYVDGVEVHNAKTKPREEQFNSTYRVVSVLTVLHQDWLNGKEYKCKVSNKGLPSSIEKTISKAKGQPREPQVYTLPPSQEEMTKNQVSLTCLVKGFYPSDIAVEWESNGQPENNYKTTPPVLDSDGSFFLYSRLTVDKSRWQEGNVFSCSVMHEALHNHYTQKSLSLSLGKSGGPGPAGLYAQPGSAPTSSSTKKTQLQLEHLLLDLQMILNGINNYKNPKLTRMLTFKFYMPKKATELKHLQCLEEELKPLEEVLNLAQSKNFHLRPRDLISNINVIVLELKGSETTFMCEYADETATIVEFLNRWITFCQSIISTLTGGGGSGGGGSGGGGSGGGGSGGGGSGGGGSSGGPGPAGLYAQPGSEVQLVESGGGLVQPGGSLRLSCAASGFTFSSYTLAWVRQAPGKGLEWVAAIDSSSYTYSPDTVRGRFTISRDNAKNSLYLQMNSLRAEDTAVYYCARDSNWDALDYWGQGTTVTVSSASTKGPSVFPLAPSSKSTSGGTAALGCLVKDYFPEPVTVSWNSGALTSGVHTFPAVLQSSGLYSLSSVVTVPSSSLGTQTYICNVNHKPSNTKVDKRVEPKSC

SEQ ID NO: 364 - protein, 245 aa, Artificial Sequence
  Description of Artificial Sequence: Synthetic polypeptide
EVQLVESGGGLVQPGGSLRLSCAASGFTFSSYTLAWVRQAPGKGLEWVAAIDSSSYTYSPDTVRGRFTISRDNAKNSLYLQMNSLRAEDTAVYYCARDSNWDALDYWGQGTTVTVSSSGGPGPAGLYAQPGSDIQMTQSPSSLSASVGDRVTITCKVTEKVWGNVAWYQQKPGKAPISLIYSPSLRKSGVPSRFSGSGSGTDFTLTISSLQPEDFATYYCQQYYTYPYTFGGGTKVEIKHHHHHH

SEQ ID NO: 365 - protein, 245 aa, Artificial Sequence
  Description of Artificial Sequence: Synthetic polypeptide
EVQLVESGGGLVQPGGSLRLSCAASGFTFSSYTLAWVRQAPGKGLEWVAAIDSSSYTYSPDTVRGRFTISRDNAKNSLYLQMNSLRAEDTAVYYCARDSNWDALDYWGQGTTVTVSSSGGPGPAGLYAQPGSDIQMTQSPSSLSASVGDRVTITCKAREKLWSAVAWYQQKPGKAPKALIYSASFRYSGVPSRFSGSGSGTDFTLTISSLQPEDFATYYCQQYYTYPYTFGGGTKVEIKHHHHHH

SEQ ID NO: 366 - protein, 245 aa, Artificial Sequence
  Description of Artificial Sequence: Synthetic polypeptide
EVQLVESGGGLVQPGGSLRLSCAASGFTFSSYTLAWVRQAPGKGLEWVAAIDSSSYTYSPDTVRGRFTISRDNAKNSLYLQMNSLRAEDTAVYYCARDSNWDALDYWGQGTTVTVSSSGGPGPAGLYAQPGSDIQMTQSPSSLSASVGDRVTITCKAREKLWSAVAWYQQKPGKAPKSLIYSASFRYSGVPSRFSGSGSGTDFTLTISSLQPEDFATYYCQQYYTYPYTFGGGTKVEIKHHHHHH

SEQ ID NO: 367 - protein, 609 aa, Artificial Sequence
  Description of Artificial Sequence: Synthetic polypeptide
EVQLVESGGGLVQPGNSLRLSCAASGFTFSKFGMSWVRQAPGKGLEWVSSISGSGRDTLYAESVKGRFTISRDNAKTTLYLQMNSLRPEDTAVYYCTIGGSLSVSSQGTLVTVSSSGGPGPAGMKGLPGSRVIPVSGPARCLSQSRNLLKTTDDMVKTAREKLKHYSCTAEDIDHEDITRDQTSTLKTCLPLELHKNESCLATRETSSTTRGSCLPPQKTSLMMTLCLGSIYEDLKMYQTEFQAINAALQNHNHQQIILDKGMLVAIDELMQSLNHNGETLRQKPPVGEADPYRVKMKLCILLHAFSTRVVTINRVMGYLSSASGGPGPAGMKGLPGSGGGGSGGGGSGGGGSGGGGSGGGGSGGGGSQSVLTQPPSVSGAPGQRVTISCSGSRSNIGSNTVKWYQQLPGTAPKLLIYYNDQRPSGVPDRFSGSKSGTSASLAITGLQAEDEADYYCQSYDRYTHPALLFGTGTKVTVLGGGGSGGGGSGGGGSQVQLVESGGGVVQPGRSLRLSCAASGFTFSSYGMHWVRQAPGKGLEWVAFIRYDGSNKYYADSVKGRFTISRDNSKNTLYLQMNSLRAEDTAVYYCKTHGSHDNWGQGTMVTVSS

SEQ ID NO: 368 - protein, 930 aa, Artificial Sequence
  Description of Artificial Sequence: Synthetic polypeptide
EVQLVESGGGLVQPGNSLRLSCAASGFTFSKFGMSWVRQAPGKGLEWVSSISGSGRDTLYAESVKGRFTISRDNAKTTLYLQMNSLRPEDTAVYYCTIGGSLSVSSQGTLVTVSSSGGPGPAGMKGLPGSIWELKKDVYVVELDWYPDAPGEMVVLTCDTPEEDGITWTLDQSSEVLGSGKTLTIQVKEFGDAGQYTCHKGGEVLSHSLLLLHKKEDGIWSTDILKDQKEPKNKTFLRCEAKNYSGRFTCWWLTTISTDLTFSVKSSRGSSDPQGVTCGAATLSAERVRGDNKEYEYSVECQEDSASPAAEESLPIEVMVDAVHKLKYENYTSSFFIRDIIKPDPPKNLQLKPLKNSRQVEVSWEYPDTWSTPHSYFSLTFCVQVQGKSKREKKDRVFTDKTSATVICRKNASISVRAQDRYYSSSWSEWASVPCSGGGGSGGGGSGGGGSRVIPVSGPARCLSQSRNLLKTTDDMVKTAREKLKHYSCTAEDIDHEDITRDQTSTLKTCLPLELHKNESSLATRETSSTTRGSCLPPQKTSLMMTLCLGSIYEDLKMYQTEFQAINAALQNHNHQQIILDKGMLVAIDELMQSLNHNGETLRQKPPVGEADPYRVKMKLCILLHAFSTRVVTINRVMGYLSSASGGPGPAGMKGLPGSGGGGSGGGGSGGGGSGGGGSGGGGSGGGGSQSVLTQPPSVSGAPGQRVTISCSGSRSNIGSNTVKWYQQLPGTAPKLLIYYNDQRPSGVPDRFSGSKSGTSASLAITGLQAEDEADYYCQSYDRYTHPALLFGTGTKVTVLGGGGSGGGGSGGGGSQVQLVESGGGVVQPGRSLRLSCAASGFTFSSYGMHWVRQAPGKGLEWVAFIRYDGSNKYYADSVKGRFTISRDNSKNTLYLQMNSLRAEDTAVYYCKTHGSHDNWGQGTMVTVSS

SEQ ID NO: 369 - protein, 935 aa, Artificial Sequence
  Description of Artificial Sequence: Synthetic polypeptide
EVQLVESGGGLVQPGNSLRLSCAASGFTFSKFGMSWVRQAPGKGLEWVSSISGSGRDTLYAESVKGRFTISRDNAKTTLYLQMNSLRPEDTAVYYCTIGGSLSVSSQGTLVTVSSSGGPGPAGMKGLPGSIWELKKDVYVVELDWYPDAPGEMVVLTCDTPEEDGITWTLDQSSEVLGSGKTLTIQVKEFGDAGQYTCHKGGEVLSHSLLLLHKKEDGIWSTDILKDQKEPKNKTFLRCEAKNYSGRFTCWWLTTISTDLTFSVKSSRGSSDPQGVTCGAATLSAERVRGDNKEYEYSVECQEDSACPAAEESLPIEVMVDAVHKLKYENYTSSFFIRDIIKPDPPKNLQLKPLKNSRQVEVSWEYPDTWSTPHSYFSLTFCVQVQGKSKREKKDRVFTDKTSATVICRKNASISVRAQDRYYSSSWSEWASVPCSGGGGSGGGGSGGGGSGGGGSRVIPVSGPARCLSQSRNLLKTTDDMVKTAREKLKHYSCTAEDIDHEDITRDQTSTLKTCLPLELHKNESCLATRETSSTTRGSCLPPQKTSLMMTLCLGSIYEDLKMYQTEFQAINAALQNHNHQQIILDKGMLVAIDELMQSLNHNGETLRQKPPVGEADPYRVKMKLCILLHAFSTRVVTINRVMGYLSSASGGPGPAGMKGLPGSGGGGSGGGGSGGGGSGGGGSGGGGSGGGGSQSVLTQPPSVSGAPGQRVTISCSGSRSNIGSNTVKWYQQLPGTAPKLLIYYNDQRPSGVPDRFSGSKSGTSASLAITGLQAEDEADYYCQSYDRYTHPALLFGTGTKVTVLGGGGSGGGGSGGGGSQVQLVESGGGVVQPGRSLRLSCAASGFTFSSYGMHWVRQAPGKGLEWVAFIRYDGSNKYYADSVKGRFTISRDNSKNTLYLQMNSLRAEDTAVYYCKTHGSHDNWGQGTMVTVSS

SEQ ID NO: 370 - protein, 930 aa, Artificial Sequence
  Description of Artificial Sequence: Synthetic polypeptide
EVQLVESGGGLVQPGNSLRLSCAASGFTFSKFGMSWVRQAPGKGLEWVSSISGSGRDTLYAESVKGRFTISRDNAKTTLYLQMNSLRPEDTAVYYCTIGGSLSVSSQGTLVTVSSSGGPGPAGMKGLPGSIWELKKDVYVVELDWYPDAPGEMVVLTCDTPEEDGITWTLDQSSEVLGSGKTLTIQVKEFGDAGQYTCHKGGEVLSHSLLLLHKKEDGIWSTDILKDQKEPKNKTFLRCEAKNYSGRFTCWWLTTISTDLTFSVKSSRGSSDPQGVTCGAATLSAERVRGDNKEYEYSVECQEDSACPAAEESLPIEVMVDAVHKLKYENYTSSFFIRDIIKPDPPKNLQLKPLKNSRQVEVSWEYPDTWSTPHSYFSLTFCVQVQGKSKREKKDRVFTDKTSATVICRKNASISVRAQDRYYSSSWSEWASVPCSGGGGSGGGGSGGGGSRVIPVSGPARCLSQSRNLLKTTDDMVKTAREKLKHYSCTAEDIDHEDITRDQTSTLKTCLPLELHKNESCLATRETSSTTRGSCLPPQKTSLMMTLCLGSIYEDLKMYQTEFQAINAALQNHNHQQIILDKGMLVAIDELMQSLNHNGETLRQKPPVGEADPYRVKMKLCILLHAFSTRVVTINRVMGYLSSASGGPGPAGMKGLPGSGGGGSGGGGSGGGGSGGGGSGGGGSGGGGSQSVLTQPPSVSGAPGQRVTISCSGSRSNIGSNTVKWYQQLPGTAPKLLIYYNDQRPSGVPDRFSGSKSGTSASLAITGLQAEDEADYYCQSYDRYTHPALLFGCGTKVTVLGGGGSGGGGSGGGGSQVQLVESGGGVVQPGRSLRLSCAASGFTFSSYGMHWVRQAPGKCLEWVAFIRYDGSNKYYADSVKGRFTISRDNSKNTLYLQMNSLRAEDTAVYYCKTHGSHDNWGQGTMVTVSS

SEQ ID NO: 371 - protein, 930 aa, Artificial Sequence
  Description of Artificial Sequence: Synthetic polypeptide
EVQLVESGGGLVQPGNSLRLSCAASGFTFSKFGMSWVRQAPGKGLEWVSSISGSGRDTLYAESVKGRFTISRDNAKTTLYLQMNSLRPEDTAVYYCTIGGSLSVSSQGTLVTVSSSGGPGPAGMKGLPGSIWELKKDVYVVELDWYPDAPGEMVVLTCDTPEEDGITWTLDQSSEVLGSGKTLTIQVKEFGDAGQYTCHKGGEVLSHSLLLLHKKEDGIWSTDILKDQKEPKNKTFLRCEAKNYSGRFTCWWLTTISTDLTFSVKSSRGSSDPQGVTCGAATLSAERVRGDNKEYEYSVECQEDSACPAAEESLPIEVMVDAVHKLKYENYTSSFFIRDIIKPDPPKNLQLKPLKNSRQVEVSWEYPDTWSTPHSYFSLTFCVQVQGKSKREKKDRVFTDKTSATVICRKNASISVRAQDRYYSSSWSEWASVPCSGGGGSGGGGSGGGGSRVIPVSGPARCLSQSRNLLKTTDDMVKTAREKLKHYSCTAEDIDHEDITRDQTSTLKTCLPLELHKNESCLATRETSSTTRGSCLPPQKTSLMMTLCLGSIYEDLKMYQTEFQAINAALQNHNHQQIILDKGMLVAIDELMQSLNHNGETLRQKPPVGEADPYRVKMKLCILLHAFSTRVVTINRVMGYLSSASGGPGPAGMKGLPGSGGGGSGGGGSGGGGSGGGGSGGGGSGGGGSQSVLTQPPSVSGAPGQRVTISCSGSRSNIGSNTVKWYQQLPGTCPKLLIYYNDQRPSGVPDRFSGSKSGTSASLAITGLQAEDEADYYCQSYDRYTHPALLFGTGTKVTVLGGGGSGGGGSGGGGSQVQLVESGGGVVQPGRSLRLSCAASGFTFSSYGMHWVRQAPGKGLEWVAFIRYDGSNKYYADSVKGRFTISRDNSKNTLYLQMNSLRAEDTAVYYCKTHGSHDNWGCGTMVTVSS

SEQ ID NO: 372 - protein, 553 aa, Artificial Sequence; identical to SEQ ID NO: 49
  Description of Artificial Sequence: Synthetic polypeptide

SEQ ID NO: 373 - protein, 444 aa, Artificial Sequence
  Description of Artificial Sequence: Synthetic polypeptide
APTSSSTKKTQLQLEHLLLDLQMILNGINNYKNPKLTRMLTFKFYMPKKATELKHLQCLEEELKPLEEVLNLAQSKNFHLRPRDLISNINVIVLELKGSETTFMCEYADETATIVEFLNRWITFCQSIISTLTSGGPGPAGMKGLPGSEVQLVESGGGLVQPGNSLRLSCAASGFTFSKFGMSWVRQAPGKGLEWVSSISGSGRDTLYAESVKGRFTISRDNAKTTLYLQMNSLRPEDTAVYYCTIGGSLSVSSQGTLVTVSSGGGGSGGGGSGGGGSGGGGSGGGGSGGGGSSGGPGPAGMKGLPGQVQLQESGGGLVQTGGSLRLSCTTSGTIFSGYTMGWYRQAPGEQRELVAVISGGGDTNYADSVKGRFTISRDNTKDTMYLQMNSLKPEDTAVYYCYSREVTPPWKLYWGQGTQVTVSSAAAYPYDVPDYGSHHHHHH

SEQ ID NO: 374 - protein, 444 aa, Artificial Sequence
  Description of Artificial Sequence: Synthetic polypeptide
APTSSSTKKTQLQLEHLLLDLQMILNGINNYKNPKLTRMLTFKFYMPKKATELKHLQCLEEELKPLEEVLNLAQSKNFHLRPRDLISNINVIVLELKGSETTFMCEYADETATIVEFLNRWITFCQSIISTLTSGGPGPAGMKGLPGSEVQLVESGGGLVQPGNSLRLSCAASGFTFSKFGMSWVRQAPGKGLEWVSSISGSGRDTLYAESVKGRFTISRDNAKTTLYLQMNSLRPEDTAVYYCTIGGSLSVSSQGTLVTVSSGGGGSGGGGSGGGGSGGGGSGGGGSGGGGSSGGPGPAGMKGLPGQVQLQESGGGLVQEGGSLRLSCAASERIFSTDVMGWYRQAAEKQRELVAVVSARGTTNYLDAVKGRFTISRDNARNTLTLQMNDLKPEDTASYYCYVRETTSPWRIYWGQGTQVTVSSAAAYPYDVPDYGSHHHHHH

SEQ ID NO: 375 - protein, 445 aa, Artificial Sequence
  Description of Artificial Sequence: Synthetic polypeptide
APTSSSTKKTQLQLEHLLLDLQMILNGINNYKNPKLTRMLTFKFYMPKKATELKHLQCLEEELKPLEEVLNLAQSKNFHLRPRDLISNINVIVLELKGSETTFMCEYADETATIVEFLNRWITFCQSIISTLTSGGPGPAGMKGLPGSEVQLVESGGGLVQPGNSLRLSCAASGFTFSKFGMSWVRQAPGKGLEWVSSISGSGRDTLYAESVKGRFTISRDNAKTTLYLQMNSLRPEDTAVYYCTIGGSLSVSSQGTLVTVSSGGGGSGGGGSGGGGSGGGGSGGGGSGGGGSSGGPGPAGMKGLPGQVQLQESGGGLVQAGGSLRLSCAASGSIFSANAMGWYRQAPGKQRELVAVISSGGSTNYADSVKGRFTISRDNAKNTVYLQMNSLKPEDTAVYYCMYSGSYYYTPNDYWGQGTQVTVSSAAAYPYDVPDYGSHHHHHH

SEQ ID NO: 376 - protein, 557 aa, Artificial Sequence
  Description of Artificial Sequence: Synthetic polypeptide
APTSSSTKKTQLQLEHLLLDLQMILNGINNYKNPKLTRMLTFKFYMPKKATELKHLQCLEEELKPLEEVLNLAQSKNFHLRPRDLISNINVIVLELKGSETTFMCEYADETATIVEFLNRWITFCQSIISTLTSGGPGPAGMKGLPGSEVQLVESGGGLVQPGNSLRLSCAASGFTFSKFGMSWVRQAPGKGLEWVSSISGSGRDTLYAESVKGRFTISRDNAKTTLYLQMNSLRPEDTAVYYCTIGGSLSVSSQGTLVTVSSGGGGSGGGGSGGGGSGGGGSGGGGSGGGGSSGGPGPAGMKGLPGSEVQLVESGGGLVQPGGSLRLSCAASGFTFSSYTLAWVRQAPGKGLEWVAAIDSSSYTYSPDTVRGRFTISRDNAKNSLYLQMNSLRAEDTAVYYCARDSNWDALDYWGQGTTVTVSSSGGPGPAGMKGLPGSDIQMTQSPSSLSASVGDRVTITCKASQNVGTNVGWYQQKPGKAPKALIYSASFRYSGVPSRFSGSGSGTDFTLTISSLQPEDFATYYCQQYYTYPYTFGGGTKVEIKHHHHHHEPEA

SEQ ID NO: 377 - protein, 557 aa, Artificial Sequence
  Description of Artificial Sequence: Synthetic polypeptide
APTSSSTKKTQLQLEHLLLDLQMILNGINNYKNPKLTRMLTFKFYMPKKATELKHLQCLEEELKPLEEVLNLAQSKNFHLRPRDLISNINVIVLELKGSETTFMCEYADETATIVEFLNRWITFCQSIISTLTSGGPGPAGMKGLPGSEVQLVESGGGLVQPGNSLRLSCAASGFTFSKFGMSWVRQAPGKGLEWVSSISGSGRDTLYAESVKGRFTISRDNAKTTLYLQMNSLRPEDTAVYYCTIGGSLSVSSQGTLVTVSSGGGGSGGGGSGGGGSGGGGSGGGGSGGGGSSGGPGPAGMKGLPGSEVQLVESGGGLVQPGGSLRLSCAASGFTFSSYTLAWVRQAPGKGLEWVAAIDSSSYTYSPDTVRGRFTISRDNAKNSLYLQMNSLRAEDTAVYYCARDSNWDALDYWGQGTTVTVSSGGGGSGGGGSGGGGSDIQMTQSPSSLSASVGDRVTITCKASQNVGTNVGWYQQKPGKAPKLLIYSASFRYSGVPSRFSGSGSGTDFTLTISSLQPEDFATYYCQQYYTYPYTFGGGTKVEIKHHHHHHEPEA

SEQ ID NO: 378 - protein, 557 aa, Artificial Sequence
  Description of Artificial Sequence: Synthetic polypeptide
APTSSSTKKTQLQLEHLLLDLQMILNGINNYKNPKLTRMLTFKFYMPKKATELKHLQCLEEELKPLEEVLNLAQSKNFHLRPRDLISNINVIVLELKGSETTFMCEYADETATIVEFLNRWITFCQSIISTLTSGGPGPAGMKGLPGSEVQLVESGGGLVQPGNSLRLSCAASGFTFSKFGMSWVRQAPGKGLEWVSSISGSGRDTLYAESVKGRFTISRDNAKTTLYLQMNSLRPEDTAVYYCTIGGSLSVSSQGTLVTVSSGGGGSGGGGSGGGGSGGGGSGGGGSGGGGSSGGPGPAGMKGLPGSEVQLVESGGGLVQPGGSLRLSCAASGFTFSSYTLAWVRQAPGKGLEWVAAIDSSSYTYSPDTVRGRFTISRDNAKNSLYLQMNSLRAEDTAVYYCARDSNWDALDYWGQGTTVTVSSGGGGSGGGGSGGGGSDIQMTQSPSSLSASVGDRVTITCKASQNVGTNVGWYQQKPGKAPKGLIYSASFRYSGVPSRFSGSGSGTDFTLTISSLQPEDFATYYCQQYYTYPYTFGGGTKVEIKHHHHHHEPEA

SEQ ID NO: 379 - protein, 557 aa, Artificial Sequence
  Description of Artificial Sequence: Synthetic polypeptide
APTSSSTKKTQLQLEHLLLDLQMILNGINNYKNPKLTRMLTFKFYMPKKATELKHLQCLEEELKPLEEVLNLAQSKNFHLRPRDLISNINVIVLELKGSETTFMCEYADETATIVEFLNRWITFSQSIISTLTSGGPGPAGMKGLPGSEVQLVESGGGLVQPGNSLRLSCAASGFTFSKFGMSWVRQAPGKGLEWVSSISGSGRDTLYAESVKGRFTISRDNAKTTLYLQMNSLRPEDTAVYYCTIGGSLSVSSQGTLVTVSSGGGGSGGGGSGGGGSGGGGSGGGGSGGGGSSGGPGPAGMKGLPGSEVQLVESGGGLVQPGGSLRLSCAASGFTFSSYTLAWVRQAPGKGLEWVAAIDSSSYTYSPDTVRGRFTISRDNAKNSLYLQMNSLRAEDTAVYYCARDSNWDALDYWGQGTTVTVSSGGGGSGGGGSGGGGSDIQMTQSPSSLSASVGDRVTITCKASQNVGTNVGWYQQKPGKAPKALIYSASFRYSGVPSRFSGSGSGTDFTLTISSLQPEDFATYYCQQYYTYPYTFGGGTKVEIKHHHHHHEPEA

SEQ ID NO: 380 - protein, 1027 aa, Artificial Sequence
  Description of Artificial Sequence: Synthetic polypeptide
APTSSSTKKTQLQLEHLLLDLQMILNGINNYKNPKLTRMLTFKFYMPKKATELKHLQCLEEELKPLEEVLNLAQSKNFHLRPRDLISNINVIVLELKGSETTFMCEYADETATIVEFLNRWITFCQSIISTLTSGGPGPAGMKGLPGSDAHKSEVAHRFKDLGEENFKALVLIAFAQYLQQCPFEDHVKLVNEVTEFAKTCVADESAENCDKSLHTLFGDKLCTVATLRETYGEMADCCAKQEPERNECFLQHKDDNPNLPRLVRPEVDVMCTAFHDNEETFLKKYLYEIARRHPYFYAPELLFFAKRYKAAFTECCQAADKAACLLPKLDELRDEGKASSAKQRLKCASLQKFGERAFKAWAVARLSQRFPKAEFAEVSKLVTDLTKVHTECCHGDLLECADDRADLAKYICENQDSISSKLKECCEKPLLEKSHCIAEVENDEMPADLPSLAADFVESKDVCKNYAEAKDVFLGMFLYEYARRHPDYSVVLLLRLAKTYETTLEKCCAAADPHECYAKVFDEFKPLVEEPQNLIKQNCELFEQLGEYKFQNALLVRYTKKVPQVSTPTLVEVSRNLGKVGSKCCKHPEAKRMPCAEDYLSVVLNQLCVLHEKTPVSDRVTKCCTESLVNRRPCFSALEVDETYVPKEFNAETFTFHADICTLSEKERQIKKQTALVELVKHKPKATKEQLKAVMDDFAAFVEKCCKADDKETCFAEEGKKLVAASQAALGLGGGGSGGGGSGGGGSGGGGSGGGGSGGGGSSGGPGPAGMKGLPGSEVQLVESGGGLVQPGGSLRLSCAASGFTFSSYTLAWVRQAPGKGLEWVAAIDSSSYTYSPDTVRGRFTISRDNAKNSLYLQMNSLRAEDTAVYYCARDSNWDALDYWGQGTTVTVSSGGGGSGGGGSGGGGSDIQMTQSPSSLSASVGDRVTITCKASQNVGTNVGWYQQKPGKAPKALIYSASFRYSGVPSRFSGSGSGTDFTLTISSLQPEDFATYYCQQYYTYPYTFGGGTKVEIKHHHHHHEPEA

SEQ ID NO: 381 - protein, 1022 aa, Artificial Sequence
  Description of Artificial Sequence: Synthetic polypeptide
APTSSSTKKTQLQLEHLLLDLQMILNGINNYKNPKLTRMLTFKFYMPKKATELKHLQCLEEELKPLEEVLNLAQSKNFHLRPRDLISNINVIVLELKGSETTFMCEYADETATIVEFLNRWITFCQSIISTLTSGGPGPAGMKGLPGSEAHKSEIAHRYNDLGEQHFKGLVLIAFSQYLQKCSYDEHAKLVQEVTDFAKTCVADESAANCDKSLHTLFGDKLCAIPNLRENYGELADCCTKQEPERNECFLQHKDDNPSLPPFERPEAEAMCTSFKENPTTFMGHYLHEVARRHPYFYAPELLYYAEQYNEILTQCCAEADKESCLTPKLDGVKEKALVSSVRQRMKCSSMQKFGERAFKAWAVARLSQTFPNADFAEITKLATDLTKVNKECCHGDLLECADDRAELAKYMCENQATISSKLQTCCDKPLLKKAHCLSEVEHDTMPADLPAIAADFVEDQEVCKNYAEAKDVFLGTFLYEYSRRHPDYSVSLLLRLAKKYEATLEKCCAEANPPACYGTVLAEFQPLVEEPKNLVKTNCDLYEKLGEYGFQNAILVRYTQKAPQVSTPTLVEAARNLGRVGTKCCTLPEDQRLPCVEDYLSAILNRVCLLHEKTPVSEHVTKCCSGSLVERRPCFSALTVDETYVPKEFKAETFTFHSDICTLPEKEKQIKKQTALAELVKHKPKATAEQLKTVMDDFAQFLDTCCKAADKDTCFSTEGPNLVTRCKDALAGGGGSGGGGSGGGGSGGGGSGGGGSGGGGSSGGPGPAGMKGLPGSEVQLVESGGGLVQPGGSLRLSCAASGFTFSSYTLAWVRQAPGKGLEWVAAIDSSSYTYSPDTVRGRFTISRDNAKNSLYLQMNSLRAEDTAVYYCARDSNWDALDYWGQGTTVTVSSGGGGSGGGGSGGGGSDIQMTQSPSSLSASVGDRVTITCKASQNVGTNVGWYQQKPGKAPKALIYSASFRYSGVPSRFSGSGSGTDFTLTISSLQPEDFATYYCQQYYTYPYTFGGGTKVEIKHHHHHH

SEQ ID NO: 382 - protein, 1336 aa, Artificial Sequence
  Description of Artificial Sequence: Synthetic polypeptide
EAHKSEIAHRYNDLGEQHFKGLVLIAFSQYLQKCSYDEHAKLVQEVTDFAKTCVADESAANCDKSLHTLFGDKLCAIPNLRENYGELADCCTKQEPERNECFLQHKDDNPSLPPFERPEAEAMCTSFKENPTTFMGHYLHEVARRHPYFYAPELLYYAEQYNEILTQCCAEADKESCLTPKLDGVKEKALVSSVRQRMKCSSMQKFGERAFKAWAVARLSQTFPNADFAEITKLATDLTKVNKECCHGDLLECADDRAELAKYMCENQATISSKLQTCCDKPLLKKAHCLSEVEHDTMPADLPAIAADFVEDQEVCKNYAEAKDVFLGTFLYEYSRRHPDYSVSLLLRLAKKYEATLEKCCAEANPPACYGTVLAEFQPLVEEPKNLVKTNCDLYEKLGEYGFQNAILVRYTQKAPQVSTPTLVEAARNLGRVGTKCCTLPEDQRLPCVEDYLSAILNRVCLLHEKTPVSEHVTKCCSGSLVERRPCFSALTVDETYVPKEFKAETFTFHSDICTLPEKEKQIKKQTALAELVKHKPKATAEQLKTVMDDFAQFLDTCCKAADKDTCFSTEGPNLVTRCKDALASGGPGPAGMKGLPGSTFKFYMPKKATELKHLQCLEEELKPLEEVLNLAQSKNFHLRPRDLISNINVIVLELKGSETTFMCEYADETATIVEFLNRWITFCQSIISTLTGGSSSTKKTQLQLEHLLLDLQMILNGINNYKNPKLTRMLSGGPGPAGMKGLPGSEAHKSEIAHRYNDLGEQHFKGLVLIAFSQYLQKCSYDEHAKLVQEVTDFAKTCVADESAANCDKSLHTLFGDKLCAIPNLRENYGELADCCTKQEPERNECFLQHKDDNPSLPPFERPEAEAMCTSFKENPTTFMGHYLHEVARRHPYFYAPELLYYAEQYNEILTQCCAEADKESCLTPKLDGVKEKALVSSVRQRMKCSSMQKFGERAFKAWAVARLSQTFPNADFAEITKLATDLTKVNKECCHGDLLECADDRAELAKYMCENQATISSKLQTCCDKPLLKKAHCLSEVEHDTMPADLPAIAADFVEDQEVCKNYAEAKDVFLGTFLYEYSRRHPDYSVSLLLRLAKKYEATLEKCCAEANPPACYGTVLAEFQPLVEEPKNLVKTNCDLYEKLGEYGFQNAILVRYTQKAPQVSTPTLVEAARNLGRVGTKCCTLPEDQRLPCVEDYLSAILNRVCLLHEKTPVSEHVTKCCSGSLVERRPCFSALTVDETYVPKEFKAETFTFHSDICTLPEKEKQIKKQTALAELVKHKPKATAEQLKTVMDDFAQFLDTCCKAADKDTCFSTEGPNLVTRCKDALAHHHHHH

SEQ ID NO: 383 - protein, 817 aa, Artificial Sequence
  Description of Artificial Sequence: Synthetic polypeptide
APTSSSTKKTQLQLEHLLLDLQMILNGINNYKNPKLTRMLTFKFYMPKKATELKHLQCLEEELKPLEEVLNLAQSKNFHLRPRDLISNINVIVLELKGSETTFMCEYADETATIVEFLNRWITFCQSIISTLTSGGPGPAGMKGLPGSEVQLVESGGGLVQPGNSLRLSCAASGFTFSKFGMSWVRQAPGKGLEWVSSISGSGRDTLYAESVKGRFTISRDNAKTTLYLQMNSLRPEDTAVYYCTIGGSLSVSSQGTLVTVSSGGGGSGGGGSGGGGSGGGGSGGGGSGGGGSSGGPGPAGMKGLPGSEVQLVESGGGLVQPGGSLRLSCAASGFTFSSYTLAWVRQAPGKGLEWVAAIDSSSYTYSPDTVRGRFTISRDNAKNSLYLQMNSLRAEDTAVYYCARDSNWDALDYWGQGTTVTVSSGGGGSGGGGSGGGGSDIQMTQSPSSLSASVGDRVTITCKASQNVGTNVGWYQQKPGKAPKALIYSASFRYSGVPSRFSGSGSGTDFTLTISSLQPEDFATYYCQQYYTYPYTFGGGTKVEIKSGGPGPAGMKGLPGSGGGGSGGGGSGGGGSGGGGSGGGGSGGGGSELCDDDPPEIPHATFKAMAYKEGTMLNCECKRGFRRIKSGSLYMLCTGNSSHSSWDNQCQCTSSATRNTTKQVTPQPEEQKERKTTEMQSPMQPVDQASLPGHCREPPPWENEATERIYHFVVGQMVYYQCVQGYRALHRGPAESVCKMTHGKTRWTQPQLICTGEMETSQFPGEEKPQASPEGRPESETSCLVTTTDFQIQTEMAATMETSIFTTEYQHHHHHH

SEQ ID NO: 384 - protein, 817 aa, Artificial Sequence
  Description of Artificial Sequence: Synthetic polypeptide
ELCDDDPPEIPHATFKAMAYKEGTMLNCECKRGFRRIKSGSLYMLCTGNSSHSSWDNQCQCTSSATRNTTKQVTPQPEEQKERKTTEMQSPMQPVDQASLPGHCREPPPWENEATERIYHFVVGQMVYYQCVQGYRALHRGPAESVCKMTHGKTRWTQPQLICTGEMETSQFPGEEKPQASPEGRPESETSCLVTTTDFQIQTEMAATMETSIFTTEYQGGGGSGGGGSGGGGSGGGGSGGGGSGGGGSSGGPGPAGMKGLPGSAPTSSSTKKTQLQLEHLLLDLQMILNGINNYKNPKLTRMLTFKFYMPKKATELKHLQCLEEELKPLEEVLNLAQSKNFHLRPRDLISNINVIVLELKGSETTFMCEYADETATIVEFLNRWITFCQSIISTLTSGGPGPAGMKGLPGSEVQLVESGGGLVQPGNSLRLSCAASGFTFSKFGMSWVRQAPGKGLEWVSSISGSGRDTLYAESVKGRFTISRDNAKTTLYLQMNSLRPEDTAVYYCTIGGSLSVSSQGTLVTVSSGGGGSGGGGSGGGGSGGGGSGGGGSGGGGSSGGPGPAGMKGLPGSEVQLVESGGGLVQPGGSLRLSCAASGFTFSSYTLAWVRQAPGKGLEWVAAIDSSSYTYSPDTVRGRFTISRDNAKNSLYLQMNSLRAEDTAVYYCARDSNWDALDYWGQGTTVTVSSGGGGSGGGGSGGGGSDIQMTQSPSSLSASVGDRVTITCKASQNVGTNVGWYQQKPGKAPKALIYSASFRYSGVPSRFSGSGSGTDFTLTISSLQPEDFATYYCQQYYTYPYTFGGGTKVEIKHHHHHH

SEQ ID NO: 385 - protein, 817 aa, Artificial Sequence
  Description of Artificial Sequence: Synthetic polypeptide
APTSSSTKKTQLQLEHLLLDLQMILNGINNYKNPKLTRMLTFKFYMPKKATELKHLQCLEEELKPLEEVLNLAQSKNFHLRPRDLISNINVIVLELKGSETTFMCEYADETATIVEFLNRWITFCQSIISTLTSGGPGPAGMKGLPGSGGGGSGGGGSGGGGSGGGGSGGGGSGGGGSELCDDDPPEIPHATFKAMAYKEGTMLNCECKRGFRRIKSGSLYMLCTGNSSHSSWDNQCQCTSSATRNTTKQVTPQPEEQKERKTTEMQSPMQPVDQASLPGHCREPPPWENEATERIYHFVVGQMVYYQCVQGYRALHRGPAESVCKMTHGKTRWTQPQLICTGEMETSQFPGEEKPQASPEGRPESETSCLVTTTDFQIQTEMAATMETSIFTTEYQSGGPGPAGMKGLPGSEVQLVESGGGLVQPGNSLRLSCAASGFTFSKFGMSWVRQAPGKGLEWVSSISGSGRDTLYAESVKGRFTISRDNAKTTLYLQMNSLRPEDTAVYYCTIGGSLSVSSQGTLVTVSSGGGGSGGGGSGGGGSGGGGSGGGGSGGGGSSGGPGPAGMKGLPGSEVQLVESGGGLVQPGGSLRLSCAASGFTFSSYTLAWVRQAPGKGLEWVAAIDSSSYTYSPDTVRGRFTISRDNAKNSLYLQMNSLRAEDTAVYYCARDSNWDALDYWGQGTTVTVSSGGGGSGGGGSGGGGSDIQMTQSPSSLSASVGDRVTITCKASQNVGTNVGWYQQKPGKAPKALIYSASFRYSGVPSRFSGSGSGTDFTLTISSLQPEDFATYYCQQYYTYPYTFGGGTKVEIKHHHHHH

SEQ ID NO: 386 - protein, 682 aa, Artificial Sequence
  Description of Artificial Sequence: Synthetic polypeptide
EVQLVESGGGLVQPGNSLRLSCAASGFTFSKFGMSWVRQAPGKGLEWVSSISGSGRDTLYAESVKGRFTISRDNAKTTLYLQMNSLRPEDTAVYYCTIGGSLSVSSQGTLVTVSSSGGPGPAGMKGLPGSTFKFYMPKKATELKHLQCLEEELKPLEEVLNLAQSKNFHLRPRDLISNINVIVLELKGSETTFMCEYADETATIVEFLNRWITFCQSIISTLTGGSSSTKKTQLQLEHLLLDLQMILNGINNYKNPKLTRMLSGGPGPAGMKGLPGSEVQLVESGGGLVQPGNSLRLSCAASGFTFSKFGMSWVRQAPGKGLEWVSSISGSGRDTLYAESVKGRFTISRDNAKTTLYLQMNSLRPEDTAVYYCTIGGSLSVSSQGTLVTVSSGGGGSGGGGSGGGGSGGGGSGGGGSGGGGSSGGPGPAGMKGLPGSEVQLVESGGGLVQPGGSLRLSCAASGFTFSSYTLAWVRQAPGKGLEWVAAIDSSSYTYSPDTVRGRFTISRDNAKNSLYLQMNSLRAEDTAVYYCARDSNWDALDYWGQGTTVTVSSGGGGSGGGGSGGGGSDIQMTQSPSSLSASVGDRVTITCKASQNVGTNVGWYQQKPGKAPKALIYSASFRYSGVPSRFSGSGSGTDFTLTISSLQPEDFATYYCQQYYTYPYTFGGGTKVEIKHHHHHH

SEQ ID NO: 387 - protein, 682 aa, Artificial Sequence
  Description of Artificial Sequence: Synthetic polypeptide
EVQLVESGGGLVQPGGSLRLSCAASGFTFSSYTLAWVRQAPGKGLEWVAAIDSSSYTYSPDTVRGRFTISRDNAKNSLYLQMNSLRAEDTAVYYCARDSNWDALDYWGQGTTVTVSSGGGGSGGGGSGGGGSDIQMTQSPSSLSASVGDRVTITCKASQNVGTNVGWYQQKPGKAPKALIYSASFRYSGVPSRFSGSGSGTDFTLTISSLQPEDFATYYCQQYYTYPYTFGGGTKVEIKSGGPGPAGMKGLPGSGGGGSGGGGSGGGGSGGGGSGGGGSGGGGSEVQLVESGGGLVQPGNSLRLSCAASGFTFSKFGMSWVRQAPGKGLEWVSSISGSGRDTLYAESVKGRFTISRDNAKTTLYLQMNSLRPEDTAVYYCTIGGSLSVSSQGTLVTVSSSGGPGPAGMKGLPGSTFKFYMPKKATELKHLQCLEEELKPLEEVLNLAQSKNFHLRPRDLISNINVIVLELKGSETTFMCEYADETATIVEFLNRWITFCQSIISTLTGGSSSTKKTQLQLEHLLLDLQMILNGINNYKNPKLTRMLSGGPGPAGMKGLPGSEVQLVESGGGLVQPGNSLRLSCAASGFTFSKFGMSWVRQAPGKGLEWVSSISGSGRDTLYAESVKGRFTISRDNAKTTLYLQMNSLRPEDTAVYYCTIGGSLSVSSQGTLVTVSSHHHHHH

SEQ ID NO: 388 - protein, 553 aa, Artificial Sequence
  Description of Artificial Sequence: Synthetic polypeptide
APTSSSTKKTQLQLEHLLLDLQMILNGINNYKNPKLTRMLTFKFYMPKKATELKHLQCLEEELKPLEEVLNLAQSKNFHLRPRDLISNINVIVLELKGSETTFMCEYADETATIVEFLNRWITFCQSIISTLTSGGPGPAGMKGLPGSEVQLVESGGGLVQPGNSLRLSCAASGFTFSKFGMSWVRQAPGKGLEWVSSISGSGRDTLYAESVKGRFTISRDNAKTTLYLQMNSLRPEDTAVYYCTIGGSLSVSSQGTLVTVSSGGGGSGGGGSGGGGSGGGGSGGGGSGGGGSSGGPGPAGMKGLPGSEVQLVESGGGLVQPGGSLRLSCAASGFTFSSYTLAWVRQAPGKGLEWVAAIDSSSYTYSPDTVRGRFTISRDNAKNSLYLQMNSLRAEDTAVYYCARDSNWDALDYWGQGTTVTVSSGGGGSGGGGSGGGGSDIQMTQSPSSLSASVGDRVTITCKASQNVGTNVGWYQQKPGKAPKSLIYSASFRYSGVPSRFSGSGSGTDFTLTISSLQPEDFATYYCQQYYTYPYTFGGGTKVEIKHHHHHH

SEQ ID NO: 389 - protein, 553 aa, Artificial Sequence
  Description of Artificial Sequence: Synthetic polypeptide
APTSSSTKKTQLQLEHLLLDLQMILNGINNYKNPKLTRMLTFKFYMPKKATELKHLQCLEEELKPLEEVLNLAQSKNFHLRPRDLISNINVIVLELKGSETTFMCEYADETATIVEFLNRWITFCQSIISTLTSGGPGPAGMKGLPGSEVQLVESGGGLVQPGNSLRLSCAASGFTFSKFGMSWVRQAPGKGLEWVSSISGSGRDTLYAESVKGRFTISRDNAKTTLYLQMNSLRPEDTAVYYCTIGGSLSVSSQGTLVTVSSGGGGSGGGGSGGGGSGGGGSGGGGSGGGGSSGGPGPAGMKGLPGSEVQLVESGGGLVQPGGSLRLSCAASGFTFSSYTLAWVRQAPGKGLEWVAAIDSSSYTYSPDTVRGRFTISRDNAKNSLYLQMNSLRAEDTAVYYCARDSNWDALDYWGQGTTVTVSSGGGGSGGGGSGGGGSDIQMTQSPSSLSASVGDRVTITCKASQNVGTNVGWYQQKPGQAPRLLIYSASFRYSGVPSRFSGSGSGTDFTLTISSLQPEDFATYYCQQYYTYPYTFGGGTKVEIKHHHHHH

SEQ ID NO: 390 - protein, 667 aa, Artificial Sequence
  Description of Artificial Sequence: Synthetic polypeptide
APTSSSTKKTQLQLEHLLLDLQMILNGINNYKNPKLTRMLTFKFYMPKKATELKHLQCLEEELKPLEEVLNLAQSKNFHLRPRDLISNINVIVLELKGSETTFMCEYADETATIVEFLNRWITFCQSIISTLTSGGPGPAGMKGLPGSESKYGPPCPPCPAPEFLGGPSVFLFPPKPKDTLMISRTPEVTCVVVDVSQEDPEVQFNWYVDGVEVHNAKTKPREEQFNSTYRVVSVLTVLHQDWLNGKEYKCKVSNKGLPSSIEKTISKAKGQPREPQVYTLPPSQEEMTKNQVSLTCLVKGFYPSDIAVEWESNGQPENNYKTTPPVLDSDGSFFLYSRLTVDKSRWQEGNVFSCSVMHEALHNHYTQKSLSLSLGKGGGGSGGGGSGGGGSGGGGSGGGGSGGGGSSGGPGPAGMKGLPGSEVQLVESGGGLVQPGGSLRLSCAASGFTFSSYTLAWVRQAPGKGLEWVAAIDSSSYTYSPDTVRGRFTISRDNAKNSLYLQMNSLRAEDTAVYYCARDSNWDALDYWGQGTTVTVSSGGGGSGGGGSGGGGSDIQMTQSPSSLSASVGDRVTITCKASQNVGTNVGWYQQKPGKAPKALIYSASFRYSGVPSRFSGSGSGTDFTLTISSLQPEDFATYYCQQYYTYPYTFGGGTKVEIKHHHHHH

SEQ ID NO: 391 - protein, 667 aa, Artificial Sequence
  Description of Artificial Sequence: Synthetic polypeptide
ESKYGPPCPPCPAPEFLGGPSVFLFPPKPKDTLMISRTPEVTCVVVDVSQEDPEVQFNWYVDGVEVHNAKTKPREEQFNSTYRVVSVLTVLHQDWLNGKEYKCKVSNKGLPSSIEKTISKAKGQPREPQVYTLPPSQEEMTKNQVSLTCLVKGFYPSDIAVEWESNGQPENNYKTTPPVLDSDGSFFLYSRLTVDKSRWQEGNVFSCSVMHEALHNHYTQKSLSLSLGKSGGPGPAGMKGLPGSAPTSSSTKKTQLQLEHLLLDLQMILNGINNYKNPKLTRMLTFKFYMPKKATELKHLQCLEEELKPLEEVLNLAQSKNFHLRPRDLISNINVIVLELKGSETTFMCEYADETATIVEFLNRWITFCQSIISTLTGGGGSGGGGSGGGGSGGGGSGGGGSGGGGSSGGPGPAGMKGLPGSEVQLVESGGGLVQPGGSLRLSCAASGFTFSSYTLAWVRQAPGKGLEWVAAIDSSSYTYSPDTVRGRFTISRDNAKNSLYLQMNSLRAEDTAVYYCARDSNWDALDYWGQGTTVTVSSGGGGSGGGGSGGGGSDIQMTQSPSSLSASVGDRVTITCKASQNVGTNVGWYQQKPGKAPKALIYSASFRYSGVPSRFSGSGSGTDFTLTISSLQPEDFATYYCQQYYTYPYTFGGGTKVEIKHHHHHH

SEQ ID NO: 392 - protein, 667 aa, Artificial Sequence
  Description of Artificial Sequence: Synthetic polypeptide
APTSSSTKKTQLQLEHLLLDLQMILNGINNYKNPKLTRMLTFKFYMPKKATELKHLQCLEEELKPLEEVLNLAQSKNFHLRPRDLISNINVIVLELKGSETTFMCEYADETATIVEFLNRWITFCQSIISTLTSGGPGPAGMKGLPGSGGGGSGGGGSGGGGSGGGGSGGGGSGGGGSEVQLVESGGGLVQPGGSLRLSCAASGFTFSSYTLAWVRQAPGKGLEWVAAIDSSSYTYSPDTVRGRFTISRDNAKNSLYLQMNSLRAEDTAVYYCARDSNWDALDYWGQGTTVTVSSGGGGSGGGGSGGGGSDIQMTQSPSSLSASVGDRVTITCKASQNVGTNVGWYQQKPGKAPKALIYSASFRYSGVPSRFSGSGSGTDFTLTISSLQPEDFATYYCQQYYTYPYTFGGGTKVEIKSGGPGPAGMKGLPGSESKYGPPCPPCPAPEFLGGPSVFLFPPKPKDTLMISRTPEVTCVVVDVSQEDPEVQFNWYVDGVEVHNAKTKPREEQFNSTYRVVSVLTVLHQDWLNGKEYKCKVSNKGLPSSIEKTISKAKGQPREPQVYTLPPSQEEMTKNQVSLTCLVKGFYPSDIAVEWESNGQPENNYKTTPPVLDSDGSFFLYSRLTVDKSRWQEGNVFSCSVMHEALHNHYTQKSLSLSLGKHHHHHH

SEQ ID NO: 393 - protein, 665 aa, Artificial Sequence
  Description of Artificial Sequence: Synthetic polypeptide
VPRDCGCKPCICTVPEVSSVFIFPPKPKDVLTITLTPKVTCVVVDISKDDPEVQFSWFVDDVEVHTAQTQPREEQFNSTFRSVSELPIMHQDWLNGKEFKCRVNSAAFPAPIEKTISKTKGRPKAPQVYTIPPPKEQMAKDKVSLTCMITDFFPEDITVEWQWNGQPAENYKNTQPIMDTDGSYFVYSKLNVQKSNWEAGNTFTCSVLHEGLHNHHTEKSLSHSPGKSGGPGPAGMKGLPGSAPTSSSTKKTQLQLEHLLLDLQMILNGINNYKNPKLTRMLTFKFYMPKKATELKHLQCLEEELKPLEEVLNLAQSKNFHLRPRDLISNINVIVLELKGSETTFMCEYADETATIVEFLNRWITFCQSIISTLTGGGGSGGGGSGGGGSGGGGSGGGGSGGGGSSGGPGPAGMKGLPGSEVQLVESGGGLVQPGGSLRLSCAASGFTFSSYTLAWVRQAPGKGLEWVAAIDSSSYTYSPDTVRGRFTISRDNAKNSLYLQMNSLRAEDTAVYYCARDSNWDALDYWGQGTTVTVSSGGGGSGGGGSGGGGSDIQMTQSPSSLSASVGDRVTITCKASQNVGTNVGWYQQKPGKAPKALIYSASFRYSGVPSRFSGSGSGTDFTLTISSLQPEDFATYYCQQYYTYPYTFGGGTKVEIKHHHHHH

SEQ ID NO: 394 - protein, 547 aa, Artificial Sequence
  Description of Artificial Sequence: Synthetic polypeptide
APTSSSTKKTQLQLEHLLLDLQMILNGINNYKNPKLTRMLTFKFYMPKKATELKHLQCLEEELKPLEEVLNLAQSKNFHLRPRDLISNINVIVLELKGSETTFMCEYADETATIVEFLNRWITFCQSIISTLTSGGPGPAGLYAQPGSEVQLVESGGGLVQPGNSLRLSCAASGFTFSKFGMSWVRQAPGKGLEWVSSISGSGRDTLYAESVKGRFTISRDNAKTTLYLQMNSLRPEDTAVYYCTIGGSLSVSSQGTLVTVSSGGGGSGGGGSGGGGSGGGGSGGGGSGGGGSSGGPGPAGLYAQPGSEVQLVESGGGLVQPGGSLRLSCAASGFTFSSYTLAWVRQAPGKGLEWVAAIDSSSYTYSPDTVRGRFTISRDNAKNSLYLQMNSLRAEDTAVYYCARDSNWDALDYWGQGTTVTVSSSGGPGPAGLYAQPGSDIQMTQSPSSLSASVGDRVTITCKAREKLWSAVAWYQQKPGKAPKSLIYSASFRYSGVPSRFSGSGSGTDFTLTISSLQPEDFATYYCQQYYTYPYTFGGGTKVEIK

SEQ ID NO: 395 - protein, 547 aa, Artificial Sequence
  Description of Artificial Sequence: Synthetic polypeptide
APTSSSTKKTQLQLEHLLLDLQMILNGINNYKNPKLTRMLTFKFYMPKKATELKHLQCLEEELKPLEEVLNLAQSKNFHLRPRDLISNINVIVLELKGSETTFMCEYADETATIVEFLNRWITFCQSIISTLTSGGPGPAGLYAQPGSEVQLVESGGGLVQPGNSLRLSCAASGFTFSKFGMSWVRQAPGKGLEWVSSISGSGRDTLYAESVKGRFTISRDNAKTTLYLQMNSLRPEDTAVYYCTIGGSLSVSSQGTLVTVSSGGGGSGGGGSGGGGSGGGGSGGGGSGGGGSSGGPGPAGLYAQPGSEVQLVESGGGLVQPGGSLRLSCAASGFTFSSYTLAWVRQAPGKGLEWVAAIDSSSYTYSPDTVRGRFTISRDNAKNSLYLQMNSLRAEDTAVYYCARDSNWDALDYWGQGTTVTVSSGGGGSGGGGSGGGGSDIQMTQSPSSLSASVGDRVTITCKAREKLWSAVAWYQQKPGKAPKSLIYSASFRYSGVPSRFSGSGSGTDFTLTISSLQPEDFATYYCQQYYTYPYTFGGGTKVEIK

SEQ ID NO: 396 - protein, 547 aa, Artificial Sequence
  Description of Artificial Sequence: Synthetic polypeptide
APTSSSTKKTQLQLEHLLLDLQMILNGINNYKNPKLTRMLTFKFYMPKKATELKHLQCLEEELKPLEEVLNLAQSKNFHLRPRDLISNINVIVLELKGSETTFMCEYADETATIVEFLNRWITFCQSIISTLTSGGPGPAGLYAQPGSEVQLVESGGGLVQPGNSLRLSCAASGFTFSKFGMSWVRQAPGKGLEWVSSISGSGRDTLYAESVKGRFTISRDNAKTTLYLQMNSLRPEDTAVYYCTIGGSLSVSSQGTLVTVSSGGGGSGGGGSGGGGSGGGGSGGGGSGGGGSSGGPGPAGLYAQPGSEVQLVESGGGLVQPGGSLRLSCAASGFTFSSYTLAWVRQAPGKGLEWVAAIDSSSYTYSPDTVRGRFTISRDNAKNSLYLQMNSLRAEDTAVYYCARDSNWDALDYWGQGTTVTVSSSGGPGPAGLYAQPGSDIQMTQSPSSLSASVGDRVTITCKVTEKVWGNVAWYQQKPGKAPISLIYSPSLRKSGVPSRFSGSGSGTDFTLTISSLQPEDFATYYCQQYYTYPYTFGGGTKVEIK

SEQ ID NO: 397 - protein, 547 aa, Artificial Sequence
  Description of Artificial Sequence: Synthetic polypeptide
APTSSSTKKTQLQLEHLLLDLQMILNGINNYKNPKLTRMLTFKFYMPKKATELKHLQCLEEELKPLEEVLNLAQSKNFHLRPRDLISNINVIVLELKGSETTFMCEYADETATIVEFLNRWITFCQSIISTLTSGGPGPAGLYAQPGSEVQLVESGGGLVQPGNSLRLSCAASGFTFSKFGMSWVRQAPGKGLEWVSSISGSGRDTLYAESVKGRFTISRDNAKTTLYLQMNSLRPEDTAVYYCTIGGSLSVSSQGTLVTVSSGGGGSGGGGSGGGGSGGGGSGGGGSGGGGSSGGPGPAGLYAQPGSEVQLVESGGGLVQPGGSLRLSCAASGFTFSSYTLAWVRQAPGKGLEWVAAIDSSSYTYSPDTVRGRFTISRDNAKNSLYLQMNSLRAEDTAVYYCARDSNWDALDYWGQGTTVTVSSGGGGSGGGGSGGGGSDIQMTQSPSSLSASVGDRVTITCKVTEKVWGNVAWYQQKPGKAPISLIYSPSLRKSGVPSRFSGSGSGTDFTLTISSLQPEDFATYYCQQYYTYPYTFGGGTKVEIK

SEQ ID NO: 398 - protein, 427 aa, Artificial Sequence
  Description of Artificial Sequence: Synthetic polypeptide
APTSSSTKKTQLQLEHLLLDLQMILNGINNYKNPKLTRMLTFKFYMPKKATELKHLQCLEEELKPLEEVLNLAQSKNFHLRPRDLISNINVIVLELKGSETTFMCEYADETATIVEFLNRWITFCQSIISTLTSGGPGPAGLYAQPGSEVQLVESGGGLVQPGNSLRLSCAASGFTFSKFGMSWVRQAPGKGLEWVSSISGSGRDTLYAESVKGRFTISRDNAKTTLYLQMNSLRPEDTAVYYCTIGGSLSVSSQGTLVTVSSGGGGSGGGGSGGGGSGGGGSGGGGSGGGGSSGGPGPAGLYAQPGSEVQLLESGGGLVQPGGSLRLSCAASGSIFSANAMGWYRQAPGKGLELVAVISSGGSTNYADSVKGRFTISRDNSKNTVYLQMNSLRAEDTAVYYCMYSGSYYYTPNDYWGQGTLVTVSS

SEQ ID NO: 399 - protein, 426 aa, Artificial Sequence
  Description of Artificial Sequence: Synthetic polypeptide
APTSSSTKKTQLQLEHLLLDLQMILNGINNYKNPKLTRMLTFKFYMPKKATELKHLQCLEEELKPLEEVLNLAQSKNFHLRPRDLISNINVIVLELKGSETTFMCEYADETATIVEFLNRWITFCQSIISTLTSGGPGPAGLYAQPGSEVQLVESGGGLVQPGNSLRLSCAASGFTFSKFGMSWVRQAPGKGLEWVSSISGSGRDTLYAESVKGRFTISRDNAKTTLYLQMNSLRPEDTAVYYCTIGGSLSVSSQGTLVTVSSGGGGSGGGGSGGGGSGGGGSGGGGSGGGGSSGGPGPAGLYAQPGSEVQLLESGGGLVQPGGSLRLSCAASERIFSTDVMGWYRQAPGKQRELVAVVSARGTTNYLDAVKGRFTISRDNSKNTLYLQMNSLRAEDTAVYYCYVRETTSPWRIYWGQGTLVTVSS

SEQ ID NO: 400 - protein, 811 aa, Artificial Sequence
  Description of Artificial Sequence: Synthetic polypeptide
ELCDDDPPEIPHATFKAMAYKEGTMLNCECKRGFRRIKSGSLYMLCTGNSSHSSWDNQCQCTSSATRNTTKQVTPQPEEQKERKTTEMQSPMQPVDQASLPGHCREPPPWENEATERIYHFVVGQMVYYQCVQGYRALHRGPAESVCKMTHGKTRWTQPQLICTGEMETSQFPGEEKPQASPEGRPESETSSLVTTTDFQIQTEMAATMETSIFTTEYQGGGGSGGGGSGGGGSGGGGSGGGGSGGGGSSGGPGPAGLYAQPGSAPTSSSTKKTQLQLEHLLLDLQMILNGINNYKNPKLTRMLTFKFYMPKKATELKHLQCLEEELKPLEEVLNLAQSKNFHLRPRDLISNINVIVLELKGSETTFMCEYADETATIVEFLNRWITFCQSIISTLTSGGPGPAGLYAQPGSEVQLVESGGGLVQPGNSLRLSCAASGFTFSKFGMSWVRQAPGKGLEWVSSISGSGRDTLYAESVKGRFTISRDNAKTTLYLQMNSLRPEDTAVYYCTIGGSLSVSSQGTLVTVSSGGGGSGGGGSGGGGSGGGGSGGGGSGGGGSSGGPGPAGLYAQPGSEVQLVESGGGLVQPGGSLRLSCAASGFTFSSYTLAWVRQAPGKGLEWVAAIDSSSYTYSPDTVRGRFTISRDNAKNSLYLQMNSLRAEDTAVYYCARDSNWDALDYWGQGTTVTVSSSGGPGPAGLYAQPGSDIQMTQSPSSLSASVGDRVTITCKAREKLWSAVAWYQQKPGKAPKSLIYSASFRYSGVPSRFSGSGSGTDFTLTISSLQPEDFATYYCQQYYTYPYTFGGGTKVEIK

SEQ ID NO: 401 - protein, 811 aa, Artificial Sequence
  Description of Artificial Sequence: Synthetic polypeptide
ELCDDDPPEIPHATFKAMAYKEGTMLNCECKRGFRRIKSGSLYMLCTGNSSHSSWDNQCQCTSSATRNTTKQVTPQPEEQKERKTTEMQSPMQPVDQASLPGHCREPPPWENEATERIYHFVVGQMVYYQCVQGYRALHRGPAESVCKMTHGKTRWTQPQLICTGEMETSQFPGEEKPQASPEGRPESETSSLVTTTDFQIQTEMAATMETSIFTTEYQGGGGSGGGGSGGGGSGGGGSGGGGSGGGGSSGGPGPAGLYAQPGSAPTSSSTKKTQLQLEHLLLDLQMILNGINNYKNPKLTRMLTFKFYMPKKATELKHLQCLEEELKPLEEVLNLAQSKNFHLRPRDLISNINVIVLELKGSETTFMCEYADETATIVEFLNRWITFCQSIISTLTSGGPGPAGLYAQPGSEVQLVESGGGLVQPGNSLRLSCAASGFTFSKFGMSWVRQAPGKGLEWVSSISGSGRDTLYAESVKGRFTISRDNAKTTLYLQMNSLRPEDTAVYYCTIGGSLSVSSQGTLVTVSSGGGGSGGGGSGGGGSGGGGSGGGGSGGGGSSGGPGPAGLYAQPGSEVQLVESGGGLVQPGGSLRLSCAASGFTFSSYTLAWVRQAPGKGLEWVAAIDSSSYTYSPDTVRGRFTISRDNAKNSLYLQMNSLRAEDTAVYYCARDSNWDALDYWGQGTTVTVSSGGGGSGGGGSGGGGSDIQMTQSPSSLSASVGDRVTITCKAREKLWSAVAWYQQKPGKAPKSLIYSASFRYSGVPSRFSGSGSGTDFTLTISSLQPEDFATYYCQQYYTYPYTFGGGTKVEIK

SEQ ID NO: 402 - protein, 811 aa, Artificial Sequence
  Description of Artificial Sequence: Synthetic polypeptide
ELCDDDPPEIPHATFKAMAYKEGTMLNCECKRGFRRIKSGSLYMLCTGNSSHSSWDNQCQCTSSATRNTTKQVTPQPEEQKERKTTEMQSPMQPVDQASLPGHCREPPPWENEATERIYHFVVGQMVYYQCVQGYRALHRGPAESVCKMTHGKTRWTQPQLICTGEMETSQFPGEEKPQASPEGRPESETSSLVTTTDFQIQTEMAATMETSIFTTEYQGGGGSGGGGSGGGGSGGGGSGGGGSGGGGSSGGPGPAGLYAQPGSAPTSSSTKKTQLQLEHLLLDLQMILNGINNYKNPKLTRMLTFKFYMPKKATELKHLQCLEEELKPLEEVLNLAQSKNFHLRPRDLISNINVIVLELKGSETTFMCEYADETATIVEFLNRWITFCQSIISTLTSGGPGPAGLYAQPGSEVQLVESGGGLVQPGNSLRLSCAASGFTFSKFGMSWVRQAPGKGLEWVSSISGSGRDTLYAESVKGRFTISRDNAKTTLYLQMNSLRPEDTAVYYCTIGGSLSVSSQGTLVTVSSGGGGSGGGGSGGGGSGGGGSGGGGSGGGGSSGGPGPAGLYAQPGSEVQLVESGGGLVQPGGSLRLSCAASGFTFSSYTLAWVRQAPGKGLEWVAAIDSSSYTYSPDTVRGRFTISRDNAKNSLYLQMNSLRAEDTAVYYCARDSNWDALDYWGQGTTVTVSSSGGPGPAGLYAQPGSDIQMTQSPSSLSASVGDRVTITCKVTEKVWGNVAWYQQKPGKAPISLIYSPSLRKSGVPSRFSGSGSGTDFTLTISSLQPEDFATYYCQQYYTYPYTFGGGTKVEIK

SEQ ID NO: 403 - protein, 811 aa, Artificial Sequence
  Description of Artificial Sequence: Synthetic polypeptide
ELCDDDPPEIPHATFKAMAYKEGTMLNCECKRGFRRIKSGSLYMLCTGNSSHSSWDNQCQCTSSATRNTTKQVTPQPEEQKERKTTEMQSPMQPVDQASLPGHCREPPPWENEATERIYHFVVGQMVYYQCVQGYRALHRGPAESVCKMTHGKTRWTQPQLICTGEMETSQFPGEEKPQASPEGRPESETSSLVTTTDFQIQTEMAATMETSIFTTEYQGGGGSGGGGSGGGGSGGGGSGGGGSGGGGSSGGPGPAGLYAQPGSAPTSSSTKKTQLQLEHLLLDLQMILNGINNYKNPKLTRMLTFKFYMPKKATELKHLQCLEEELKPLEEVLNLAQSKNFHLRPRDLISNINVIVLELKGSETTFMCEYADETATIVEFLNRWITFCQSIISTLTSGGPGPAGLYAQPGSEVQLVESGGGLVQPGNSLRLSCAASGFTFSKFGMSWVRQAPGKGLEWVSSISGSGRDTLYAESVKGRFTISRDNAKTTLYLQMNSLRPEDTAVYYCTIGGSLSVSSQGTLVTVSSGGGGSGGGGSGGGGSGGGGSGGGGSGGGGSSGGPGPAGLYAQPGSEVQLVESGGGLVQPGGSLRLSCAASGFTFSSYTLAWVRQAPGKGLEWVAAIDSSSYTYSPDTVRGRFTISRDNAKNSLYLQMNSLRAEDTAVYYCARDSNWDALDYWGQGTTVTVSSGGGGSGGGGSGGGGSDIQMTQSPSSLSASVGDRVTITCKVTEKVWGNVAWYQQKPGKAPISLIYSPSLRKSGVPSRFSGSGSGTDFTLTISSLQPEDFATYYCQQYYTYPYTFGGGTKVEIK

SEQ ID NO: 404 - protein, 691 aa, Artificial Sequence
  Description of Artificial Sequence: Synthetic polypeptide
ELCDDDPPEIPHATFKAMAYKEGTMLNCECKRGFRRIKSGSLYMLCTGNSSHSSWDNQCQCTSSATRNTTKQVTPQPEEQKERKTTEMQSPMQPVDQASLPGHCREPPPWENEATERIYHFVVGQMVYYQCVQGYRALHRGPAESVCKMTHGKTRWTQPQLICTGEMETSQFPGEEKPQASPEGRPESETSSLVTTTDFQIQTEMAATMETSIFTTEYQGGGGSGGGGSGGGGSGGGGSGGGGSGGGGSSGGPGPAGLYAQPGSAPTSSSTKKTQLQLEHLLLDLQMILNGINNYKNPKLTRMLTFKFYMPKKATELKHLQCLEEELKPLEEVLNLAQSKNFHLRPRDLISNINVIVLELKGSETTFMCEYADETATIVEFLNRWITFCQSIISTLTSGGPGPAGLYAQPGSEVQLVESGGGLVQPGNSLRLSCAASGFTFSKFGMSWVRQAPGKGLEWVSSISGSGRDTLYAESVKGRFTISRDNAKTTLYLQMNSLRPEDTAVYYCTIGGSLSVSSQGTLVTVSSGGGGSGGGGSGGGGSGGGGSGGGGSGGGGSSGGPGPAGLYAQPGSEVQLLESGGGLVQPGGSLRLSCAASGSIFSANAMGWYRQAPGKGLELVAVISSGGSTNYADSVKGRFTISRDNSKNTVYLQMNSLRAEDTAVYYCMYSGSYYYTPNDYWGQGTLVTVSS

SEQ ID NO: 405 - protein, 690 aa, Artificial Sequence
  Description of Artificial Sequence: Synthetic polypeptide
ELCDDDPPEIPHATFKAMAYKEGTMLNCECKRGFRRIKSGSLYMLCTGNSSHSSWDNQCQCTSSATRNTTKQVTPQPEEQKERKTTEMQSPMQPVDQASLPGHCREPPPWENEATERIYHFVVGQMVYYQCVQGYRALHRGPAESVCKMTHGKTRWTQPQLICTGEMETSQFPGEEKPQASPEGRPESETSSLVTTTDFQIQTEMAATMETSIFTTEYQGGGGSGGGGSGGGGSGGGGSGGGGSGGGGSSGGPGPAGLYAQPGSAPTSSSTKKTQLQLEHLLLDLQMILNGINNYKNPKLTRMLTFKFYMPKKATELKHLQCLEEELKPLEEVLNLAQSKNFHLRPRDLISNINVIVLELKGSETTFMCEYADETATIVEFLNRWITFCQSIISTLTSGGPGPAGLYAQPGSEVQLVESGGGLVQPGNSLRLSCAASGFTFSKFGMSWVRQAPGKGLEWVSSISGSGRDTLYAESVKGRFTISRDNAKTTLYLQMNSLRPEDTAVYYCTIGGSLSVSSQGTLVTVSSGGGGSGGGGSGGGGSGGGGSGGGGSGGGGSSGGPGPAGLYAQPGSEVQLLESGGGLVQPGGSLRLSCAASERIFSTDVMGWYRQAPGKQRELVAVVSARGTTNYLDAVKGRFTISRDNSKNTLYLQMNSLRAEDTAVYYCYVRETTSPWRIYWGQGTLVTVSS

SEQ ID NO: 406 - protein, 661 aa, Artificial Sequence
  Description of Artificial Sequence: Synthetic polypeptide
ESKYGPPCPPCPAPEFLGGPSVFLFPPKPKDTLMISRTPEVTCVVVDVSQEDPEVQFNWYVDGVEVHNAKTKPREEQFNSTYRVVSVLTVLHQDWLNGKEYKCKVSNKGLPSSIEKTISKAKGQPREPQVYTLPPSQEEMTKNQVSLTCLVKGFYPSDIAVEWESNGQPENNYKTTPPVLDSDGSFFLYSRLTVDKSRWQEGNVFSCSVMHEALHNHYTQKSLSLSLGKSGGPGPAGLYAQPGSAPTSSSTKKTQLQLEHLLLDLQMILNGINNYKNPKLTRMLTFKFYMPKKATELKHLQCLEEELKPLEEVLNLAQSKNFHLRPRDLISNINVIVLELKGSETTFMCEYADETATIVEFLNRWITFCQSIISTLTGGGGSGGGGSGGGGSGGGGSGGGGSGGGGSSGGPGPAGLYAQPGSEVQLVESGGGLVQPGGSLRLSCAASGFTFSSYTLAWVRQAPGKGLEWVAAIDSSSYTYSPDTVRGRFTISRDNAKNSLYLQMNSLRAEDTAVYYCARDSNWDALDYWGQGTTVTVSSSGGPGPAGLYAQPGSDIQMTQSPSSLSASVGDRVTITCKAREKLWSAVAWYQQKPGKAPKSLIYSASFRYSGVPSRFSGSGSGTDFTLTISSLQPEDFATYYCQQYYTYPYTFGGGTKVEIK

SEQ ID NO: 407 - protein, 661 aa, Artificial Sequence
  Description of Artificial Sequence: Synthetic polypeptide
ESKYGPPCPPCPAPEFLGGPSVFLFPPKPKDTLMISRTPEVTCVVVDVSQEDPEVQFNWYVDGVEVHNAKTKPREEQFNSTYRVVSVLTVLHQDWLNGKEYKCKVSNKGLPSSIEKTISKAKGQPREPQVYTLPPSQEEMTKNQVSLTCLVKGFYPSDIAVEWESNGQPENNYKTTPPVLDSDGSFFLYSRLTVDKSRWQEGNVFSCSVMHEALHNHYTQKSLSLSLGKSGGPGPAGLYAQPGSAPTSSSTKKTQLQLEHLLLDLQMILNGINNYKNPKLTRMLTFKFYMPKKATELKHLQCLEEELKPLEEVLNLAQSKNFHLRPRDLISNINVIVLELKGSETTFMCEYADETATIVEFLNRWITFCQSIISTLTGGGGSGGGGSGGGGSGGGGSGGGGSGGGGSSGGPGPAGLYAQPGSEVQLVESGGGLVQPGGSLRLSCAASGFTFSSYTLAWVRQAPGKGLEWVAAIDSSSYTYSPDTVRGRFTISRDNAKNSLYLQMNSLRAEDTAVYYCARDSNWDALDYWGQGTTVTVSSGGGGSGGGGSGGGGSDIQMTQSPSSLSASVGDRVTITCKAREKLWSAVAWYQQKPGKAPKSLIYSASFRYSGVPSRFSGSGSGTDFTLTISSLQPEDFATYYCQQYYTYPYTFGGGTKVEIK

SEQ ID NO: 408 - protein, 661 aa, Artificial Sequence
  Description of Artificial Sequence: Synthetic polypeptide
ESKYGPPCPPCPAPEFLGGPSVFLFPPKPKDTLMISRTPEVTCVVVDVSQEDPEVQFNWYVDGVEVHNAKTKPREEQFNSTYRVVSVLTVLHQDWLNGKEYKCKVSNKGLPSSIEKTISKAKGQPREPQVYTLPPSQEEMTKNQVSLTCLVKGFYPSDIAVEWESNGQPENNYKTTPPVLDSDGSFFLYSRLTVDKSRWQEGNVFSCSVMHEALHNHYTQKSLSLSLGKSGGPGPAGLYAQPGSAPTSSSTKKTQLQLEHLLLDLQMILNGINNYKNPKLTRMLTFKFYMPKKATELKHLQCLEEELKPLEEVLNLAQSKNFHLRPRDLISNINVIVLELKGSETTFMCEYADETATIVEFLNRWITFCQSIISTLTGGGGSGGGGSGGGGSGGGGSGGGGSGGGGSSGGPGPAGLYAQPGSEVQLVESGGGLVQPGGSLRLSCAASGFTFSSYTLAWVRQAPGKGLEWVAAIDSSSYTYSPDTVRGRFTISRDNAKNSLYLQMNSLRAEDTAVYYCARDSNWDALDYWGQGTTVTVSSSGGPGPAGLYAQPGSDIQMTQSPSSLSASVGDRVTITCKVTEKVWGNVAWYQQKPGKAPISLIYSPSLRKSGVPSRFSGSGSGTDFTLTISSLQPEDFATYYCQQYYTYPYTFGGGTKVEIK

SEQ ID NO: 409 - protein, 661 aa, Artificial Sequence
  Description of Artificial Sequence: Synthetic polypeptide
ESKYGPPCPPCPAPEFLGGPSVFLFPPKPKDTLMISRTPEVTCVVVDVSQEDPEVQFNWYVDGVEVHNAKTKPREEQFNSTYRVVSVLTVLHQDWLNGKEYKCKVSNKGLPSSIEKTISKAKGQPREPQVYTLPPSQEEMTKNQVSLTCLVKGFYPSDIAVEWESNGQPENNYKTTPPVLDSDGSFFLYSRLTVDKSRWQEGNVFSCSVMHEALHNHYTQKSLSLSLGKSGGPGPAGLYAQPGSAPTSSSTKKTQLQLEHLLLDLQMILNGINNYKNPKLTRMLTFKFYMPKKATELKHLQCLEEELKPLEEVLNLAQSKNFHLRPRDLISNINVIVLELKGSETTFMCEYADETATIVEFLNRWITFCQSIISTLTGGGGSGGGGSGGGGSGGGGSGGGGSGGGGSSGGPGPAGLYAQPGSEVQLVESGGGLVQPGGSLRLSCAASGFTFSSYTLAWVRQAPGKGLEWVAAIDSSSYTYSPDTVRGRFTISRDNAKNSLYLQMNSLRAEDTAVYYCARDSNWDALDYWGQGTTVTVSSGGGGSGGGGSGGGGSDIQMTQSPSSLSASVGDRVTITCKVTEKVWGNVAWYQQKPGKAPISLIYSPSLRKSGVPSRFSGSGSGTDFTLTISSLQPEDFATYYCQQYYTYPYTFGGGTKVEIK

SEQ ID NO: 410 - protein, 541 aa, Artificial Sequence
  Description of Artificial Sequence: Synthetic polypeptide
ESKYGPPCPPCPAPEFLGGPSVFLFPPKPKDTLMISRTPEVTCVVVDVSQEDPEVQFNWYVDGVEVHNAKTKPREEQFNSTYRVVSVLTVLHQDWLNGKEYKCKVSNKGLPSSIEKTISKAKGQPREPQVYTLPPSQEEMTKNQVSLTCLVKGFYPSDIAVEWESNGQPENNYKTTPPVLDSDGSFFLYSRLTVDKSRWQEGNVFSCSVMHEALHNHYTQKSLSLSLGKSGGPGPAGLYAQPGSAPTSSSTKKTQLQLEHLLLDLQMILNGINNYKNPKLTRMLTFKFYMPKKATELKHLQCLEEELKPLEEVLNLAQSKNFHLRPRDLISNINVIVLELKGSETTFMCEYADETATIVEFLNRWITFCQSIISTLTGGGGSGGGGSGGGGSGGGGSGGGGSGGGGSSGGPGPAGLYAQPGSEVQLLESGGGLVQPGGSLRLSCAASGSIFSANAMGWYRQAPGKGLELVAVISSGGSTNYADSVKGRFTISRDNSKNTVYLQMNSLRAEDTAVYYCMYSGSYYYTPNDYWGQGTLVTVSS

SEQ ID NO: 411 - protein, 540 aa, Artificial Sequence
  Description of Artificial Sequence: Synthetic polypeptide
ESKYGPPCPPCPAPEFLGGPSVFLFPPKPKDTLMISRTPEVTCVVVDVSQEDPEVQFNWYVDGVEVHNAKTKPREEQFNSTYRVVSVLTVLHQDWLNGKEYKCKVSNKGLPSSIEKTISKAKGQPREPQVYTLPPSQEEMTKNQVSLTCLVKGFYPSDIAVEWESNGQPENNYKTTPPVLDSDGSFFLYSRLTVDKSRWQEGNVFSCSVMHEALHNHYTQKSLSLSLGKSGGPGPAGLYAQPGSAPTSSSTKKTQLQLEHLLLDLQMILNGINNYKNPKLTRMLTFKFYMPKKATELKHLQCLEEELKPLEEVLNLAQSKNFHLRPRDLISNINVIVLELKGSETTFMCEYADETATIVEFLNRWITFCQSIISTLTGGGGSGGGGSGGGGSGGGGSGGGGSGGGGSSGGPGPAGLYAQPGSEVQLLESGGGLVQPGGSLRLSCAASERIFSTDVMGWYRQAPGKQRELVAVVSARGTTNYLDAVKGRFTISRDNSKNTLYLQMNSLRAEDTAVYYCYVRETTSPWRIYWGQGTLVTVSS

SEQ ID NO: 412 - protein, 925 aa, Artificial Sequence
  Description of Artificial Sequence: Synthetic polypeptide
ESKYGPPCPPCPAPEFLGGPSVFLFPPKPKDTLMISRTPEVTCVVVDVSQEDPEVQFNWYVDGVEVHNAKTKPREEQFNSTYRVVSVLTVLHQDWLNGKEYKCKVSNKGLPSSIEKTISKAKGQPREPQVYTLPPSQEEMTKNQVSLTCLVKGFYPSDIAVEWESNGQPENNYKTTPPVLDSDGSFFLYSRLTVDKSRWQEGNVFSCSVMHEALHNHYTQKSLSLSLGKSGGPGPAGLYAQPGSELCDDDPPEIPHATFKAMAYKEGTMLNCECKRGFRRIKSGSLYMLCTGNSSHSSWDNQCQCTSSATRNTTKQVTPQPEEQKERKTTEMQSPMQPVDQASLPGHCREPPPWENEATERIYHFVVGQMVYYQCVQGYRALHRGPAESVCKMTHGKTRWTQPQLICTGEMETSQFPGEEKPQASPEGRPESETSSLVTTTDFQIQTEMAATMETSIFTTEYQGGGGSGGGGSGGGGSGGGGSGGGGSGGGGSSGGPGPAGLYAQPGSAPTSSSTKKTQLQLEHLLLDLQMILNGINNYKNPKLTRMLTFKFYMPKKATELKHLQCLEEELKPLEEVLNLAQSKNFHLRPRDLISNINVIVLELKGSETTFMCEYADETATIVEFLNRWITFCQSIISTLTGGGGSGGGGSGGGGSGGGGSGGGGSGGGGSSGGPGPAGLYAQPGSEVQLVESGGGLVQPGGSLRLSCAASGFTFSSYTLAWVRQAPGKGLEWVAAIDSSSYTYSPDTVRGRFTISRDNAKNSLYLQMNSLRAEDTAVYYCARDSNWDALDYWGQGTTVTVSSSGGPGPAGLYAQPGSDIQMTQSPSSLSASVGDRVTITCKAREKLWSAVAWYQQKPGKAPKSLIYSASFRYSGVPSRFSGSGSGTDFTLTISSLQPEDFATYYCQQYYTYPYTFGGGTKVEIK

SEQ ID NO: 413 - protein, 925 aa, Artificial Sequence
  Description of Artificial Sequence: Synthetic polypeptide
ESKYGPPCPPCPAPEFLGGPSVFLFPPKPKDTLMISRTPEVTCVVVDVSQEDPEVQFNWYVDGVEVHNAKTKPREEQFNSTYRVVSVLTVLHQDWLNGKEYKCKVSNKGLPSSIEKTISKAKGQPREPQVYTLPPSQEEMTKNQVSLTCLVKGFYPSDIAVEWESNGQPENNYKTTPPVLDSDGSFFLYSRLTVDKSRWQEGNVFSCSVMHEALHNHYTQKSLSLSLGKSGGPGPAGLYAQPGSELCDDDPPEIPHATFKAMAYKEGTMLNCECKRGFRRIKSGSLYMLCTGNSSHSSWDNQCQCTSSATRNTTKQVTPQPEEQKERKTTEMQSPMQPVDQASLPGHCREPPPWENEATERIYHFVVGQMVYYQCVQGYRALHRGPAESVCKMTHGKTRWTQPQLICTGEMETSQFPGEEKPQASPEGRPESETSSLVTTTDFQIQTEMAATMETSIFTTEYQGGGGSGGGGSGGGGSGGGGSGGGGSGGGGSSGGPGPAGLYAQPGSAPTSSSTKKTQLQLEHLLLDLQMILNGINNYKNPKLTRMLTFKFYMPKKATELKHLQCLEEELKPLEEVLNLAQSKNFHLRPRDLISNINVIVLELKGSETTFMCEYADETATIVEFLNRWITFCQSIISTLTGGGGSGGGGSGGGGSGGGGSGGGGSGGGGSSGGPGPAGLYAQPGSEVQLVESGGGLVQPGGSLRLSCAASGFTFSSYTLAWVRQAPGKGLEWVAAIDSSSYTYSPDTVRGRFTISRDNAKNSLYLQMNSLRAEDTAVYYCARDSNWDALDYWGQGTTVTVSSGGGGSGGGGSGGGGSDIQMTQSPSSLSASVGDRVTITCKAREKLWSAVAWYQQKPGKAPKSLIYSASFRYSGVPSRFSGSGSGTDFTLTISSLQPEDFATYYCQQYYTYPYTFGGGTKVEIK

SEQ ID NO: 414 - protein, 925 aa, Artificial Sequence
  Description of Artificial Sequence: Synthetic polypeptide
ESKYGPPCPPCPAPEFLGGPSVFLFPPKPKDTLMISRTPEVTCVVVDVSQEDPEVQFNWYVDGVEVHNAKTKPREEQFNSTYRVVSVLTVLHQDWLNGKEYKCKVSNKGLPSSIEKTISKAKGQPREPQVYTLPPSQEEMTKNQVSLTCLVKGFYPSDIAVEWESNGQPENNYKTTPPVLDSDGSFFLYSRLTVDKSRWQEGNVFSCSVMHEALHNHYTQKSLSLSLGKSGGPGPAGLYAQPGSELCDDDPPEIPHATFKAMAYKEGTMLNCECKRGFRRIKSGSLYMLCTGNSSHSSWDNQCQCTSSATRNTTKQVTPQPEEQKERKTTEMQSPMQPVDQASLPGHCREPPPWENEATERIYHFVVGQMVYYQCVQGYRALHRGPAESVCKMTHGKTRWTQPQLICTGEMETSQFPGEEKPQASPEGRPESETSSLVTTTDFQIQTEMAATMETSIFTTEYQGGGGSGGGGSGGGGSGGGGSGGGGSGGGGSSGGPGPAGLYAQPGSAPTSSSTKKTQLQLEHLLLDLQMILNGINNYKNPKLTRMLTFKFYMPKKATELKHLQCLEEELKPLEEVLNLAQSKNFHLRPRDLISNINVIVLELKGSETTFMCEYADETATIVEFLNRWITFCQSIISTLTGGGGSGGGGSGGGGSGGGGSGGGGSGGGGSSGGPGPAGLYAQPGSEVQLVESGGGLVQPGGSLRLSCAASGFTFSSYTLAWVRQAPGKGLEWVAAIDSSSYTYSPDTVRGRFTISRDNAKNSLYLQMNSLRAEDTAVYYCARDSNWDALDYWGQGTTVTVSSSGGPGPAGLYAQPGSDIQMTQSPSSLSASVGDRVTITCKVTEKVWGNVAWYQQKPGKAPISLIYSPSLRKSGVPSRFSGSGSGTDFTLTISSLQPEDFATYYCQQYYTYPYTFGGGTKVEIK

SEQ ID NO: 415 - protein, 925 aa, Artificial Sequence
  Description of Artificial Sequence: Synthetic polypeptide
ESKYGPPCPPCPAPEFLGGPSVFLFPPKPKDTLMISRTPEVTCVVVDVSQEDPEVQFNWYVDGVEVHNAKTKPREEQFNSTYRVVSVLTVLHQDWLNGKEYKCKVSNKGLPSSIEKTISKAKGQPREPQVYTLPPSQEEMTKNQVSLTCLVKGFYPSDIAVEWESNGQPENNYKTTPPVLDSDGSFFLYSRLTVDKSRWQEGNVFSCSVMHEALHNHYTQKSLSLSLGKSGGPGPAGLYAQPGSELCDDDPPEIPHATFKAMAYKEGTMLNCECKRGFRRIKSGSLYMLCTGNSSHSSWDNQCQCTSSATRNTTKQVTPQPEEQKERKTTEMQSPMQPVDQASLPGHCREPPPWENEATERIYHFVVGQMVYYQCVQGYRALHRGPAESVCKMTHGKTRWTQPQLICTGEMETSQFPGEEKPQASPEGRPESETSSLVTTTDFQIQTEMAATMETSIFTTEYQGGGGSGGGGSGGGGSGGGGSGGGGSGGGGSSGGPGPAGLYAQPGSAPTSSSTKKTQLQLEHLLLDLQMILNGINNYKNPKLTRMLTFKFYMPKKATELKHLQCLEEELKPLEEVLNLAQSKNFHLRPRDLISNINVIVLELKGSETTFMCEYADETATIVEFLNRWITFCQSIISTLTGGGGSGGGGSGGGGSGGGGSGGGGSGGGGSSGGPGPAGLYAQPGSEVQLVESGGGLVQPGGSLRLSCAASGFTFSSYTLAWVRQAPGKGLEWVAAIDSSSYTYSPDTVRGRFTISRDNAKNSLYLQMNSLRAEDTAVYYCARDSNWDALDYWGQGTTVTVSSGGGGSGGGGSGGGGSDIQMTQSPSSLSASVGDRVTITCKVTEKVWGNVAWYQQKPGKAPISLIYSPSLRKSGVPSRFSGSGSGTDFTLTISSLQPEDFATYYCQQYYTYPYTFGGGTKVEIK

SEQ ID NO: 416 - protein, 805 aa, Artificial Sequence
  Description of Artificial Sequence: Synthetic polypeptide
ESKYGPPCPPCPAPEFLGGPSVFLFPPKPKDTLMISRTPEVTCVVVDVSQEDPEVQFNWYVDGVEVHNAKTKPREEQFNSTYRVVSVLTVLHQDWLNGKEYKCKVSNKGLPSSIEKTISKAKGQPREPQVYTLPPSQEEMTKNQVSLTCLVKGFYPSDIAVEWESNGQPENNYKTTPPVLDSDGSFFLYSRLTVDKSRWQEGNVFSCSVMHEALHNHYTQKSLSLSLGKSGGPGPAGLYAQPGSELCDDDPPEIPHATFKAMAYKEGTMLNCECKRGFRRIKSGSLYMLCTGNSSHSSWDNQCQCTSSATRNTTKQVTPQPEEQKERKTTEMQSPMQPVDQASLPGHCREPPPWENEATERIYHFVVGQMVYYQCVQGYRALHRGPAESVCKMTHGKTRWTQPQLICTGEMETSQFPGEEKPQASPEGRPESETSSLVTTTDFQIQTEMAATMETSIFTTEYQGGGGSGGGGSGGGGSGGGGSGGGGSGGGGSSGGPGPAGLYAQPGSAPTSSSTKKTQLQLEHLLLDLQMILNGINNYKNPKLTRMLTFKFYMPKKATELKHLQCLEEELKPLEEVLNLAQSKNFHLRPRDLISNINVIVLELKGSETTFMCEYADETATIVEFLNRWITFCQSIISTLTGGGGSGGGGSGGGGSGGGGSGGGGSGGGGSSGGPGPAGLYAQPGSEVQLLESGGGLVQPGGSLRLSCAASGSIFSANAMGWYRQAPGKGLELVAVISSGGSTNYADSVKGRFTISRDNSKNTVYLQMNSLRAEDTAVYYCMYSGSYYYTPNDYWGQGTLVTVSS

SEQ ID NO: 417 - protein, 804 aa, Artificial Sequence
  Description of Artificial Sequence: Synthetic polypeptide
ESKYGPPCPPCPAPEFLGGPSVFLFPPKPKDTLMISRTPEVTCVVVDVSQEDPEVQFNWYVDGVEVHNAKTKPREEQFNSTYRVVSVLTVLHQDWLNGKEYKCKVSNKGLPSSIEKTISKAKGQPREPQVYTLPPSQEEMTKNQVSLTCLVKGFYPSDIAVEWESNGQPENNYKTTPPVLDSDGSFFLYSRLTVDKSRWQEGNVFSCSVMHEALHNHYTQKSLSLSLGKSGGPGPAGLYAQPGSELCDDDPPEIPHATFKAMAYKEGTMLNCECKRGFRRIKSGSLYMLCTGNSSHSSWDNQCQCTSSATRNTTKQVTPQPEEQKERKTTEMQSPMQPVDQASLPGHCREPPPWENEATERIYHFVVGQMVYYQCVQGYRALHRGPAESVCKMTHGKTRWTQPQLICTGEMETSQFPGEEKPQASPEGRPESETSSLVTTTDFQIQTEMAATMETSIFTTEYQGGGGSGGGGSGGGGSGGGGSGGGGSGGGGSSGGPGPAGLYAQPGSAPTSSSTKKTQLQLEHLLLDLQMILNGINNYKNPKLTRMLTFKFYMPKKATELKHLQCLEEELKPLEEVLNLAQSKNFHLRPRDLISNINVIVLELKGSETTFMCEYADETATIVEFLNRWITFCQSIISTLTGGGGSGGGGSGGGGSGGGGSGGGGSGGGGSSGGPGPAGLYAQPGSEVQLLESGGGLVQPGGSLRLSCAASERIFSTDVMGWYRQAPGKQRELVAVVSARGTTNYLDAVKGRFTISRDNSKNTLYLQMNSLRAEDTAVYYCYVRETTSPWRIYWGQGTLVTVSS

SEQ ID NO: 418 - protein, 245 aa, Artificial Sequence
  Description of Artificial Sequence: Synthetic polypeptide
EVQLVESGGGLVQPGGSLRLSCAASGFTFSSYTLAWVRQAPGKGLEWVAAIDSSSYTYSPDTVRGRFTISRDNAKNSLYLQMNSLRAEDTAVYYCARDSNWDALDYWGQGTTVTVSSGGGGSGGGGSGGGGSDIQMTQSPSSLSASVGDRVTITCKASQNVGTNVGWYQQKPGKAPKSLIYSASFRYSGVPSRFSGSGSGTDFTLTISSLQPEDFATYYCQQYYTYPYTFGGGTKVEIKHHHHHH

SEQ ID NO: 419 - protein, 245 aa, Artificial Sequence
  Description of Artificial Sequence: Synthetic polypeptide
EVQLVESGGGLVQPGGSLRLSCAASGFTFSSYTLAWVRQAPGKGLEWVAAIDSSSYTYSPDTVRGRFTISRDNAKNSLYLQMNSLRAEDTAVYYCARDSNWDALDYWGQGTTVTVSSSGGPGPAGLYAQPGSDIQMTQSPSSLSASVGDRVTITCKASQNVGTNVGWYQQKPGKAPKALIYSASFRYSGVPSRFSGSGSGTDFTLTISSLQPEDFATYYCQQYYTYPYTFGGGTKVEIKHHHHHH

SEQ ID NO: 420 - protein, 245 aa, Artificial Sequence
  Description of Artificial Sequence: Synthetic polypeptide
EVQLVESGGGLVQPGGSLRLSCAASGFTFSSYTLAWVRQAPGKGLEWVAAIDSSSYTYSPDTVRGRFTISRDNAKNSLYLQMNSLRAEDTAVYYCARDSNWDALDYWGQGTTVTVSSSGGPGPAGLYAQPGSDIQMTQSPSSLSASVGDRVTITCKASQNVGTNVGWYQQKPGKAPKSLIYSASFRYSGVPSRFSGSGSGTDFTLTISSLQPEDFATYYCQQYYTYPYTFGGGTKVEIKHHHHHH

SEQ ID NO: 421 - protein, 612 aa, Artificial Sequence
  Description of Artificial Sequence: Synthetic polypeptide
LVEEPKNLVKTNCDLYEKLGEYGFQNAILVRYTQKAPQVSTPTLVEAARNLGRVGTKCCTLPEDQRLPCVEDYLSAILNRVCLLHEKTPVSEHVTKCCSGSLVERRPCFSALTVDETYVPKEFKAETFTFHSDICTLPEKEKQIKKQTALAELVKHKPKATAEQLKTVMDDFAQFLDTCCKAADKDTCFSTEGPNLVTRCKDALASGGPGPAGMKGLPGSCDLPQTHNLRNKRALTLLVQMRRLSPLSCLKDRKDFGFPQEKVDAQQIKKAQAIPVLSELTQQILNIFTSKDSSAAWNTTLLDSFCNDLHQQLNDLQGCLMQQVGVQEFPLTQEDALLAVRKYFHRITVYLREKKHSPCAWEVVRAEVWRALSSSANVLGRLREEKSGGPGPAGMKGLPGSLVEEPKNLVKTNCDLYEKLGEYGFQNAILVRYTQKAPQVSTPTLVEAARNLGRVGTKCCTLPEDQRLPCVEDYLSAILNRVCLLHEKTPVSEHVTKCCSGSLVERRPCFSALTVDETYVPKEFKAETFTFHSDICTLPEKEKQIKKQTALAELVKHKPKATAEQLKTVMDDFAQFLDTCCKAADKDTCFSTEGPNLVTRCKDALAHHHHHH

SEQ ID NO: 422 - protein, 1030 aa, Artificial Sequence
  Description of Artificial Sequence: Synthetic polypeptide
EAHKSEIAHRYNDLGEQHFKGLVLIAFSQYLQKCSYDEHAKLVQEVTDFAKTCVADESAANCDKSLHTLFGDKLCAIPNLRENYGELADCCTKQEPERNECFLQHKDDNPSLPPFERPEAEAMCTSFKENPTTFMGHYLHEVARRHPYFYAPELLYYAEQYNEILTQCCAEADKESCLTPKLDGVKEKALVSSVRQGGGGSGGGGSGGSLVEEPKNLVKTNCDLYEKLGEYGFQNAILVRYTQKAPQVSTPTLVEAARNLGRVGTKCCTLPEDQRLPCVEDYLSAILNRVCLLHEKTPVSEHVTKCCSGSLVERRPCFSALTVDETYVPKEFKAETFTFHSDICTLPEKEKQIKKQTALAELVKHKPKATAEQLKTVMDDFAQFLDTCCKAADKDTCFSTEGPNLVTRCKDALASGGPGPAGMKGLPGSCDLPQTHNLRNKRALTLLVQMRRLSPLSCLKDRKDFGFPQEKVDAQQIKKAQAIPVLSELTQQILNIFTSKDSSAAWNTTLLDSFCNDLHQQLNDLQGCLMQQVGVQEFPLTQEDALLAVRKYFHRITVYLREKKHSPCAWEVVRAEVWRALSSSANVLGRLREEKSGGPGPAGMKGLPGSEAHKSEIAHRYNDLGEQHFKGLVLIAFSQYLQKCSYDEHAKLVQEVTDFAKTCVADESAANCDKSLHTLFGDKLCAIPNLRENYGELADCCTKQEPERNECFLQHKDDNPSLPPFERPEAEAMCTSFKENPTTFMGHYLHEVARRHPYFYAPELLYYAEQYNEILTQCCAEADKESCLTPKLDGVKEKALVSSVRQGGGGSGGGGSGGSLVEEPKNLVKTNCDLYEKLGEYGFQNAILVRYTQKAPQVSTPTLVEAARNLGRVGTKCCTLPEDQRLPCVEDYLSAILNRVCLLHEKTPVSEHVTKCCSGSLVERRPCFSALTVDETYVPKEFKAETFTFHSDICTLPEKEKQIKKQTALAELVKHKPKATAEQLKTVMDDFAQFLDTCCKAADKDTCFSTEGPNLVTRCKDALAHHHHHH

SEQ ID NO: 423 - protein, 466 aa, Artificial Sequence
  Description of Artificial Sequence: Synthetic polypeptide
EVQLVESGGGLVQPGNSLRLSCAASGFTFSKFGMSWVRQAPGKGLEWVSSISGSGRDTLYAESVKGRFTISRDNAKTTLYLQMNSLRPEDTAVYYCTIGGSLSVSSQGTLVTVSSGGGGSGGGSGGPGPAGMKGLPGSGGGGSGGGSCDLPQTHNLRNKRALTLLVQMRRLSPLSCLKDRKDFGFPQEKVDAQQIKKAQAIPVLSELTQQILNIFTSKDSSAAWNTTLLDSFCNDLHQQLNDLQGCLMQQVGVQEFPLTQEDALLAVRKYFHRITVYLREKKHSPCAWEVVRAEVWRALSSSANVLGRLREEKGGGGSGGGSGGPGPAGMKGLPGSGGGGSGGGSEVQLVESGGGLVQPGNSLRLSCAASGFTFSKFGMSWVRQAPGKGLEWVSSISGSGRDTLYAESVKGRFTISRDNAKTTLYLQMNSLRPEDTAVYYCTIGGSLSVSSQGTLVTVSSHHHHHH

SEQ ID NO: 424 - protein, 426 aa, Artificial Sequence
  Description of Artificial Sequence: Synthetic polypeptide
EVQLVESGGGLVQPGNSLRLSCAASGFTFSKFGMSWVRQAPGKGLEWVSSISGSGRDTLYAESVKGRFTISRDNAKTTLYLQMNSLRPEDTAVYYCTIGGSLSVSSQGTLVTVSSSGGPGPAGLYAQPGSCDLPQTHNLRNKRALTLLVQMRRLSPLSCLKDRKDFGFPQEKVDAQQIKKAQAIPVLSELTQQILNIFTSKDSSAAWNTTLLDSFCNDLHQQLNDLQGCLMQQVGVQEFPLTQEDALLAVRKYFHRITVYLREKKHSPCAWEVVRAEVWRALSSSANVLGRLREEKSGGPGPAGLYAQPGSEVQLVESGGGLVQPGNSLRLSCAASGFTFSKFGMSWVRQAPGKGLEWVSSISGSGRDTLYAESVKGRFTISRDNAKTTLYLQMNSLRPEDTAVYYCTIGGSLSVSSQGTLVTVSS

SEQ ID NO: 425 - protein, 426 aa, Artificial Sequence
  Description of Artificial Sequence: Synthetic polypeptide
EVQLVESGGGLVQPGNSLRLSCAASGFTFSKFGMSWVRQAPGKGLEWVSSISGSGRDTLYAESVKGRFTISRDNAKTTLYLQMNSLRPEDTAVYYCTIGGSLSVSSQGTLVTVSSSGGPALFKSSFPPGSCDLPQTHNLRNKRALTLLVQMRRLSPLSCLKDRKDFGFPQEKVDAQQIKKAQAIPVLSELTQQILNIFTSKDSSAAWNTTLLDSFCNDLHQQLNDLQGCLMQQVGVQEFPLTQEDALLAVRKYFHRITVYLREKKHSPCAWEVVRAEVWRALSSSANVLGRLREEKSGGPALFKSSFPPGSEVQLVESGGGLVQPGNSLRLSCAASGFTFSKFGMSWVRQAPGKGLEWVSSISGSGRDTLYAESVKGRFTISRDNAKTTLYLQMNSLRPEDTAVYYCTIGGSLSVSSQGTLVTVSS

SEQ ID NO: 426 - protein, 428 aa, Artificial Sequence
  Description of Artificial Sequence: Synthetic polypeptide
EVQLVESGGGLVQPGNSLRLSCAASGFTFSKFGMSWVRQAPGKGLEWVSSISGSGRDTLYAESVKGRFTISRDNAKTTLYLQMNSLRPEDTAVYYCTIGGSLSVSSQGTLVTVSSSGGPPLAQKLKSSPGSCDLPQTHNLRNKRALTLLVQMRRLSPLSCLKDRKDFGFPQEKVDAQQIKKAQAIPVLSELTQQILNIFTSKDSSAAWNTTLLDSFCNDLHQQLNDLQGCLMQQVGVQEFPLTQEDALLAVRKYFHRITVYLREKKHSPCAWEVVRAEVWRALSSSANVLGRLREEKSGGPPLAQKLKSSPGSEVQLVESGGGLVQPGNSLRLSCAASGFTFSKFGMSWVRQAPGKGLEWVSSISGSGRDTLYAESVKGRFTISRDNAKTTLYLQMNSLRPEDTAVYYCTIGGSLSVSSQGTLVTVSS

SEQ ID NO: 427 - protein, 425 aa, Artificial Sequence
  Description of Artificial Sequence: Synthetic polypeptide
EVQLVESGGGLVQPGNSLRLSCAASGFTFSKFGMSWVRQAPGKGLEWVSSISGSGRDTLYAESVKGRFTISRDNAKTTLYLQMNSLRPEDTAVYYCTIGGSLSVSSQGTLVTVSSSGGPGPAGLYAQPGSCDLPQTHSLGSRRTLMLLAQMRRISLFSCLKDRHDFGFPQEEFGNQFQKAETIPVLHEMIQQIFNLFSTKDSSAAWDETLLDKFYTELYQQLNDLEACVIQGVGVTETPLMKEDSILAVRKYFQRITLYLKEKKYSPCAWEVVRAEIMRSFSLSTNLQESLRSKESGGPGPAGLYAQPGSEVQLVESGGGLVQPGNSLRLSCAASGFTFSKFGMSWVRQAPGKGLEWVSSISGSGRDTLYAESVKGRFTISRDNAKTTLYLQMNSLRPEDTAVYYCTIGGSLSVSSQGTLVTVSS

SEQ ID NO: 428 - protein, 425 aa, Artificial Sequence
  Description of Artificial Sequence: Synthetic polypeptide
EVQLVESGGGLVQPGNSLRLSCAASGFTFSKFGMSWVRQAPGKGLEWVSSISGSGRDTLYAESVKGRFTISRDNAKTTLYLQMNSLRPEDTAVYYCTIGGSLSVSSQGTLVTVSSSGGPALFKSSFPPGSCDLPQTHSLGSRRTLMLLAQMRRISLFSCLKDRHDFGFPQEEFGNQFQKAETIPVLHEMIQQIFNLFSTKDSSAAWDETLLDKFYTELYQQLNDLEACVIQGVGVTETPLMKEDSILAVRKYFQRITLYLKEKKYSPCAWEVVRAEIMRSFSLSTNLQESLRSKESGGPALFKSSFPPGSEVQLVESGGGLVQPGNSLRLSCAASGFTFSKFGMSWVRQAPGKGLEWVSSISGSGRDTLYAESVKGRFTISRDNAKTTLYLQMNSLRPEDTAVYYCTIGGSLSVSSQGTLVTVSS

SEQ ID NO: 429 - protein, 427 aa, Artificial Sequence
  Description of Artificial Sequence: Synthetic polypeptide
EVQLVESGGGLVQPGNSLRLSCAASGFTFSKFGMSWVRQAPGKGLEWVSSISGSGRDTLYAESVKGRFTISRDNAKTTLYLQMNSLRPEDTAVYYCTIGGSLSVSSQGTLVTVSSSGGPPLAQKLKSSPGSCDLPQTHSLGSRRTLMLLAQMRRISLFSCLKDRHDFGFPQEEFGNQFQKAETIPVLHEMIQQIFNLFSTKDSSAAWDETLLDKFYTELYQQLNDLEACVIQGVGVTETPLMKEDSILAVRKYFQRITLYLKEKKYSPCAWEVVRAEIMRSFSLSTNLQESLRSKESGGPPLAQKLKSSPGSEVQLVESGGGLVQPGNSLRLSCAASGFTFSKFGMSWVRQAPGKGLEWVSSISGSGRDTLYAESVKGRFTISRDNAKTTLYLQMNSLRPEDTAVYYCTIGGSLSVSSQGTLVTVSS

SEQ ID NO: 430 - protein, 728 aa, Artificial Sequence
  Description of Artificial Sequence: Synthetic polypeptide
EVQLVESGGGLVQPGNSLRLSCAASGFTFSKFGMSWVRQAPGKGLEWVSSISGSGRDTLYAESVKGRFTISRDNAKTTLYLQMNSLRPEDTAVYYCTIGGSLSVSSQGTLVTVSSSGGPGPAGMKGLPGSHGTVIESLESLNNYFNSSGIDVEEKSLFLDIWRNWQKDGDMKILQSQIISFYLRLFEVLKDNQAISNNISVIESHLITTFFSNSKAKKDAFMSIAKFEVNNPQVQRQAFNELIRVVHQLLPESSLRKRKRSRCSGGPGPAGMKGLPGSCDLPQTHNLRNKRALTLLVQMRRLSPLSCLKDRKDFGFPQEKVDAQQIKKAQAIPVLSELTQQILNIFTSKDSSAAWNTTLLDSFCNDLHQQLNDLQGCLMQQVGVQEFPLTQEDALLAVRKYFHRITVYLREKKHSPCAWEVVRAEVWRALSSSANVLGRLREEKSGGPGPAGMKGLPGSHGTVIESLESLNNYFNSSGIDVEEKSLFLDIWRNWQKDGDMKILQSQIISFYLRLFEVLKDNQAISNNISVIESHLITTFFSNSKAKKDAFMSIAKFEVNNPQVQRQAFNELIRVVHQLLPESSLRKRKRSRCSGGPGPAGMKGLPGSEVQLVESGGGLVQPGNSLRLSCAASGFTFSKFGMSWVRQAPGKGLEWVSSISGSGRDTLYAESVKGRFTISRDNAKTTLYLQMNSLRPEDTAVYYCTIGGSLSVSSQGTLVTVSSHHHHHH

SEQ ID NO: 431 - protein, 947 aa, Artificial Sequence
  Description of Artificial Sequence: Synthetic polypeptide
LVEEPKNLVKTNCDLYEKLGEYGFQNAILVRYTQKAPQVSTPTLVEAARNLGRVGTKCCTLPEDQRLPCVEDYLSAILNRVCLLHEKTPVSEHVTKCCSGSLVERRPCFSALTVDETYVPKEFKAETFTFHSDICTLPEKEKQIKKQTALAELVKHKPKATAEQLKTVMDDFAQFLDTCCKAADKDTCFSTEGPNLVTRCKDALASGGPGPAGMKGLPGSHGTVIESLESLNNYFNSSGIDVEEKSLFLDIWRNWQKDGDMKILQSQIISFYLRLFEVLKDNQAISNNISVIESHLITTFFSNSKAKKDAFMSIAKFEVNNPQVQRQAFNELIRVVHQLLPESSLRKRKRSRCSGGPGPAGMKGLPGSLVEEPKNLVKTNCDLYEKLGEYGFQNAILVRYTQKAPQVSTPTLVEAARNLGRVGTKCCTLPEDQRLPCVEDYLSAILNRVCLLHEKTPVSEHVTKCCSGSLVERRPCFSALTVDETYVPKEFKAETFTFHSDICTLPEKEKQIKKQTALAELVKHKPKATAEQLKTVMDDFAQFLDTCCKAADKDTCFSTEGPNLVTRCKDALASGGPGPAGMKGLPGSHGTVIESLESLNNYFNSSGIDVEEKSLFLDIWRNWQKDGDMKILQSQIISFYLRLFEVLKDNQAISNNISVIESHLITTFFSNSKAKKDAFMSIAKFEVNNPQVQRQAFNELIRVVHQLLPESSLRKRKRSRCSGGPGPAGMKGLPGSLVEEPKNLVKTNCDLYEKLGEYGFQNAILVRYTQKAPQVSTPTLVEAARNLGRVGTKCCTLPEDQRLPCVEDYLSAILNRVCLLHEKTPVSEHVTKCCSGSLVERRPCFSALTVDETYVPKEFKAETFTFHSDICTLPEKEKQIKKQTALAELVKHKPKATAEQLKTVMDDFAQFLDTCCKAADKDTCFSTEGPNLVTRCKDALAHHHHHH

SEQ ID NO: 432 - protein, 1574 aa, Artificial Sequence
  Description of Artificial Sequence: Synthetic polypeptide
EAHKSEIAHRYNDLGEQHFKGLVLIAFSQYLQKCSYDEHAKLVQEVTDFAKTCVADESAANCDKSLHTLFGDKLCAIPNLRENYGELADCCTKQEPERNECFLQHKDDNPSLPPFERPEAEAMCTSFKENPTTFMGHYLHEVARRHPYFYAPELLYYAEQYNEILTQCCAEADKESCLTPKLDGVKEKALVSSVRQGGGGSGGGGSGGSLVEEPKNLVKTNCDLYEKLGEYGFQNAILVRYTQKAPQVSTPTLVEAARNLGRVGTKCCTLPEDQRLPCVEDYLSAILNRVCLLHEKTPVSEHVTKCCSGSLVERRPCFSALTVDETYVPKEFKAETFTFHSDICTLPEKEKQIKKQTALAELVKHKPKATAEQLKTVMDDFAQFLDTCCKAADKDTCFSTEGPNLVTRCKDALASGGPGPAGMKGLPGSHGTVIESLESLNNYFNSSGIDVEEKSLFLDIWRNWQKDGDMKILQSQIISFYLRLFEVLKDNQAISNNISVIESHLITTFFSNSKAKKDAFMSIAKFEVNNPQVQRQAFNELIRVVHQLLPESSLRKRKRSRCSGGPGPAGMKGLPGSEAHKSEIAHRYNDLGEQHFKGLVLIAFSQYLQKCSYDEHAKLVQEVTDFAKTCVADESAANCDKSLHTLFGDKLCAIPNLRENYGELADCCTKQEPERNECFLQHKDDNPSLPPFERPEAEAMCTSFKENPTTFMGHYLHEVARRHPYFYAPELLYYAEQYNEILTQCCAEADKESCLTPKLDGVKEKALVSSVRQGGGGSGGGGSGGSLVEEPKNLVKTNCDLYEKLGEYGFQNAILVRYTQKAPQVSTPTLVEAARNLGRVGTKCCTLPEDQRLPCVEDYLSAILNRVCLLHEKTPVSEHVTKCCSGSLVERRPCFSALTVDETYVPKEFKAETFTFHSDICTLPEKEKQIKKQTALAELVKHKPKATAEQLKTVMDDFAQFLDTCCKAADKDTCFSTEGPNLVTRCKDALASGGPGPAGMKGLPGSHGTVIESLESLNNYFNSSGIDVEEKSLFLDIWRNWQKDGDMKILQSQIISFYLRLFEVLKDNQAISNNISVIESHLITTFFSNSKAKKDAFMSIAKFEVNNPQVQRQAFNELIRVVHQLLPESSLRKRKRSRCSGGPGPAGMKGLPGSEAHKSEIAHRYNDLGEQHFKGLVLIAFSQYLQKCSYDEHAKLVQEVTDFAKTCVADESAANCDKSLHTLFGDKLCAIPNLRENYGELADCCTKQEPERNECFLQHKDDNPSLPPFERPEAEAMCTSFKENPTTFMGHYLHEVARRHPYFYAPELLYYAEQYNEILTQCCAEADKESCLTPKLDGVKEKALVSSVRQGGGGSGGGGSGGSLVEEPKNLVKTNCDLYEKLGEYGFQNAILVRYTQKAPQVSTPTLVEAARNLGRVGTKCCTLPEDQRLPCVEDYLSAILNRVCLLHEKTPVSEHVTKCCSGSLVERRPCFSALTVDETYVPKEFKAETFTFHSDICTLPEKEKQIKKQTALAELVKHKPKATAEQLKTVMDDFAQFLDTCCKAADKDTCFSTEGPNLVTRCKDALAHHHHHH

SEQ ID NO: 433 - protein, 745 aa, Artificial Sequence
  Description of Artificial Sequence: Synthetic polypeptide
EVQLVESGGGLVQPGNSLRLSCAASGFTFSKFGMSWVRQAPGKGLEWVSSISGSGRDTLYAESVKGRFTISRDNAKTTLYLQMNSLRPEDTAVYYCTIGGSLSVSSQGTLVTVSSGGGGSGGGSGGPGPAGMKGLPGSGGGGSGGGSHGTVIESLESLNNYFNSSGIDVEEKSLFLDIWRNWQKDGDMKILQSQIISFYLRLFEVLKDNQAISNNISVIESHLITTFFSNSKAKKDAFMSIAKFEVNNPQVQRQAFNELIRVVHQLLPESSLRKRKRSRCGGGGSGGGSGGPGPAGMKGLPGSGGGGSGGGSEVQLVESGGGLVQPGNSLRLSCAASGFTFSKFGMSWVRQAPGKGLEWVSSISGSGRDTLYAESVKGRFTISRDNAKTTLYLQMNSLRPEDTAVYYCTIGGSLSVSSQGTLVTVSSGGGGSGGGSGGPGPAGMKGLPGSGGGGSGGGSHGTVIESLESLNNYFNSSGIDVEEKSLFLDIWRNWQKDGDMKILQSQIISFYLRLFEVLKDNQAISNNISVIESHLITTFFSNSKAKKDAFMSIAKFEVNNPQVQRQAFNELIRVVHQLLPESSLRKRKRSRCGGGGSGGGSGGPGPAGMKGLPGSGGGGSGGGSEVQLVESGGGLVQPGNSLRLSCAASGFTFSKFGMSWVRQAPGKGLEWVSSISGSGRDTLYAESVKGRFTISRDNAKTTLYLQMNSLRPEDTAVYYCTIGGSLSVSSQGTLVTVSSHHHHHH

SEQ ID NO: 434 - protein, 936 aa, Artificial Sequence
  Description of Artificial Sequence: Synthetic polypeptide
EVQLVESGGGLVQPGNSLRLSCAASGFTFSKFGMSWVRQAPGKGLEWVSSISGSGRDTLYAESVKGRFTISRDNAKTTLYLQMNSLRPEDTAVYYCTIGGSLSVSSQGTLVTVSSGGGGSGGGGSGGGGSIWELKKDVYVVELDWYPDAPGEMVVLTCDTPEEDGITWTLDQSSEVLGSGKTLTIQVKEFGDAGQYTCHKGGEVLSHSLLLLHKKEDGIWSTDILKDQKEPKNKTFLRCEAKNYSGRFTCWWLTTISTDLTFSVKSSRGSSDPQGVTCGAATLSAERVRGDNKEYEYSVECQEDSACPAAEESLPIEVMVDAVHKLKYENYTSSFFIRDIIKPDPPKNLQLKPLKNSRQVEVSWEYPDTWSTPHSYFSLTFCVQVQGKSKREKKDRVFTDKTSATVICRKNASISVRAQDRYYSSSWSEWASVPCSGGGGSGGGGSGGGGSRVIPVSGPARCLSQSRNLLKTTDDMVKTAREKLKHYSCTAEDIDHEDITRDQTSTLKTCLPLELHKNESCLATRETSSTTRGSCLPPQKTSLMMTLCLGSIYEDLKMYQTEFQAINAALQNHNHQQIILDKGMLVAIDELMQSLNHNGETLRQKPPVGEADPYRVKMKLCILLHAFSTRVVTINRVMGYLSSAGGGGSGGGGSGGGGSGGGGSGGGGSGGGGSGGGGSGGGGSGGGGSQSVLTQPPSVSGAPGQRVTISCSGSRSNIGSNTVKWYQQLPGTAPKLLIYYNDQRPSGVPDRFSGSKSGTSASLAITGLQAEDEADYYCQSYDRYTHPALLFGTGTKVTVLGGGGSGGGGSGGGGSQVQLVESGGGVVQPGRSLRLSCAASGFTFSSYGMHWVRQAPGKGLEWVAFIRYDGSNKYYADSVKGRFTISRDNSKNTLYLQMNSLRAEDTAVYYCKTHGSHDNWGQGTMVTVSSHHHHHH

SEQ ID NO: 435 - protein, 1405 aa, Artificial Sequence
  Description of Artificial Sequence: Synthetic polypeptide
EAHKSEIAHRYNDLGEQHFKGLVLIAFSQYLQKCSYDEHAKLVQEVTDFAKTCVADESAANCDKSLHTLFGDKLCAIPNLRENYGELADCCTKQEPERNECFLQHKDDNPSLPPFERPEAEAMCTSFKENPTTFMGHYLHEVARRHPYFYAPELLYYAEQYNEILTQCCAEADKESCLTPKLDGVKEKALVSSVRQRMKCSSMQKFGERAFKAWAVARLSQTFPNADFAEITKLATDLTKVNKECCHGDLLECADDRAELAKYMCENQATISSKLQTCCDKPLLKKAHCLSEVEHDTMPADLPAIAADFVEDQEVCKNYAEAKDVFLGTFLYEYSRRHPDYSVSLLLRLAKKYEATLEKCCAEANPPACYGTVLAEFQPLVEEPKNLVKTNCDLYEKLGEYGFQNAILVRYTQKAPQVSTPTLVEAARNLGRVGTKCCTLPEDQRLPCVEDYLSAILNRVCLLHEKTPVSEHVTKCCSGSLVERRPCFSALTVDETYVPKEFKAETFTFHSDICTLPEKEKQIKKQTALAELVKHKPKATAEQLKTVMDDFAQFLDTCCKAADKDTCFSTEGPNLVTRCKDALASGGPGPAGMKGLPGSIWELKKDVYVVELDWYPDAPGEMVVLTCDTPEEDGITWTLDQSSEVLGSGKTLTIQVKEFGDAGQYTCHKGGEVLSHSLLLLHKKEDGIWSTDILKDQKEPKNKTFLRCEAKNYSGRFTCWWLTTISTDLTFSVKSSRGSSDPQGVTCGAATLSAERVRGDNKEYEYSVECQEDSACPAAEESLPIEVMVDAVHKLKYENYTSSFFIRDIIKPDPPKNLQLKPLKNSRQVEVSWEYPDTWSTPHSYFSLTFCVQVQGKSKREKKDRVFTDKTSATVICRKNASISVRAQDRYYSSSWSEWASVPCSGGGGSGGGGSGGGGSRVIPVSGPARCLSQSRNLLKTTDDMVKTAREKLKHYSCTAEDIDHEDITRDQTSTLKTCLPLELHKNESCLATRETSSTTRGSCLPPQKTSLMMTLCLGSIYEDLKMYQTEFQAINAALQNHNHQQIILDKGMLVAIDELMQSLNHNGETLRQKPPVGEADPYRVKMKLCILLHAFSTRVVTINRVMGYLSSASGGPGPAGMKGLPGSGGGGSGGGGSGGGGSGGGGSGGGGSGGGGSQSVLTQPPSVSGAPGQRVTISCSGSRSNIGSNTVKWYQQLPGTAPKLLIYYNDQRPSGVPDRFSGSKSGTSASLAITGLQAEDEADYYCQSYDRYTHPALLFGTGTKVTVLGGGGSGGGGSGGGGSQVQLVESGGGVVQPGRSLRLSCAASGFTFSSYGMHWVRQAPGKGLEWVAFIRYDGSNKYYADSVKGRFTISRDNSKNTLYLQMNSLRAEDTAVYYCKTHGSHDNWGQGTMVTVSSHHHHHH

SEQ ID NO: 436 - protein, 1405 aa, Artificial Sequence
  Description of Artificial Sequence: Synthetic polypeptide
IWELKKDVYVVELDWYPDAPGEMVVLTCDTPEEDGITWTLDQSSEVLGSGKTLTIQVKEFGDAGQYTCHKGGEVLSHSLLLLHKKEDGIWSTDILKDQKEPKNKTFLRCEAKNYSGRFTCWWLTTISTDLTFSVKSSRGSSDPQGVTCGAATLSAERVRGDNKEYEYSVECQEDSACPAAEESLPIEVMVDAVHKLKYENYTSSFFIRDIIKPDPPKNLQLKPLKNSRQVEVSWEYPDTWSTPHSYFSLTFCVQVQGKSKREKKDRVFTDKTSATVICRKNASISVRAQDRYYSSSWSEWASVPCSGGGGSGGGGSGGGGSRVIPVSGPARCLSQSRNLLKTTDDMVKTAREKLKHYSCTAEDIDHEDITRDQTSTLKTCLPLELHKNESCLATRETSSTTRGSCLPPQKTSLMMTLCLGSIYEDLKMYQTEFQAINAALQNHNHQQIILDKGMLVAIDELMQSLNHNGETLRQKPPVGEADPYRVKMKLCILLHAFSTRVVTINRVMGYLSSASGGPGPAGMKGLPGSGGGGSGGGGSGGGGSGGGGSGGGGSGGGGSQSVLTQPPSVSGAPGQRVTISCSGSRSNIGSNTVKWYQQLPGTAPKLLIYYNDQRPSGVPDRFSGSKSGTSASLAITGLQAEDEADYYCQSYDRYTHPALLFGTGTKVTVLGGGGSGGGGSGGGGSQVQLVESGGGVVQPGRSLRLSCAASGFTFSSYGMHWVRQAPGKGLEWVAFIRYDGSNKYYADSVKGRFTISRDNSKNTLYLQMNSLRAEDTAVYYCKTHGSHDNWGQGTMVTVSSSGGPGPAGMKGLPGSEAHKSEIAHRYNDLGEQHFKGLVLIAFSQYLQKCSYDEHAKLVQEVTDFAKTCVADESAANCDKSLHTLFGDKLCAIPNLRENYGELADCCTKQEPERNECFLQHKDDNPSLPPFERPEAEAMCTSFKENPTTFMGHYLHEVARRHPYFYAPELLYYAEQYNEILTQCCAEADKESCLTPKLDGVKEKALVSSVRQRMKCSSMQKFGERAFKAWAVARLSQTFPNADFAEITKLATDLTKVNKECCHGDLLECADDRAELAKYMCENQATISSKLQTCCDKPLLKKAHCLSEVEHDTMPADLPAIAADFVEDQEVCKNYAEAKDVFLGTFLYEYSRRHPDYSVSLLLRLAKKYEATLEKCCAEANPPACYGTVLAEFQPLVEEPKNLVKTNCDLYEKLGEYGFQNAILVRYTQKAPQVSTPTLVEAARNLGRVGTKCCTLPEDQRLPCVEDYLSAILNRVCLLHEKTPVSEHVTKCCSGSLVERRPCFSALTVDETYVPKEFKAETFTFHSDICTLPEKEKQIKKQTALAELVKHKPKATAEQLKTVMDDFAQFLDTCCKAADKDTCFSTEGPNLVTRCKDALAHHHHHH

SEQ ID NO: 437 - protein, 1048 aa, Artificial Sequence
  Description of Artificial Sequence: Synthetic polypeptide
VPRDCGCKPCICTVPEVSSVFIFPPKPKDVLTITLTPKVTCVVVDISKDDPEVQFSWFVDDVEVHTAQTQPREEQFNSTFRSVSELPIMHQDWLNGKEFKCRVNSAAFPAPIEKTISKTKGRPKAPQVYTIPPPKEQMAKDKVSLTCMITDFFPEDITVEWQWNGQPAENYKNTQPIMDTDGSYFVYSKLNVQKSNWEAGNTFTCSVLHEGLHNHHTEKSLSHSPGKSGGPGPAGMKGLPGSIWELKKDVYVVELDWYPDAPGEMVVLTCDTPEEDGITWTLDQSSEVLGSGKTLTIQVKEFGDAGQYTCHKGGEVLSHSLLLLHKKEDGIWSTDILKDQKEPKNKTFLRCEAKNYSGRFTCWWLTTISTDLTFSVKSSRGSSDPQGVTCGAATLSAERVRGDNKEYEYSVECQEDSACPAAEESLPIEVMVDAVHKLKYENYTSSFFIRDIIKPDPPKNLQLKPLKNSRQVEVSWEYPDTWSTPHSYFSLTFCVQVQGKSKREKKDRVFTDKTSATVICRKNASISVRAQDRYYSSSWSEWASVPCSGGGGSGGGGSGGGGSRVIPVSGPARCLSQSRNLLKTTDDMVKTAREKLKHYSCTAEDIDHEDITRDQTSTLKTCLPLELHKNESCLATRETSSTTRGSCLPPQKTSLMMTLCLGSIYEDLKMYQTEFQAINAALQNHNHQQIILDKGMLVAIDELMQSLNHNGETLRQKPPVGEADPYRVKMKLCILLHAFSTRVVTINRVMGYLSSASGGPGPAGMKGLPGSGGGGSGGGGSGGGGSGGGGSGGGGSGGGGSQSVLTQPPSVSGAPGQRVTISCSGSRSNIGSNTVKWYQQLPGTAPKLLIYYNDQRPSGVPDRFSGSKSGTSASLAITGLQAEDEADYYCQSYDRYTHPALLFGTGTKVTVLGGGGSGGGGSGGGGSQVQLVESGGGVVQPGRSLRLSCAASGFTFSSYGMHWVRQAPGKGLEWVAFIRYDGSNKYYADSVKGRFTISRDNSKNTLYLQMNSLRAEDTAVYYCKTHGSHDNWGQGTMVTVSSHHHHHH

SEQ ID NO: 438 - protein, 1048 aa, Artificial Sequence
  Description of Artificial Sequence: Synthetic polypeptide
IWELKKDVYVVELDWYPDAPGEMVVLTCDTPEEDGITWTLDQSSEVLGSGKTLTIQVKEFGDAGQYTCHKGGEVLSHSLLLLHKKEDGIWSTDILKDQKEPKNKTFLRCEAKNYSGRFTCWWLTTISTDLTFSVKSSRGSSDPQGVTCGAATLSAERVRGDNKEYEYSVECQEDSACPAAEESLPIEVMVDAVHKLKYENYTSSFFIRDIIKPDPPKNLQLKPLKNSRQVEVSWEYPDTWSTPHSYFSLTFCVQVQGKSKREKKDRVFTDKTSATVICRKNASISVRAQDRYYSSSWSEWASVPCSGGGGSGGGGSGGGGSRVIPVSGPARCLSQSRNLLKTTDDMVKTAREKLKHYSCTAEDIDHEDITRDQTSTLKTCLPLELHKNESCLATRETSSTTRGSCLPPQKTSLMMTLCLGSIYEDLKMYQTEFQAINAALQNHNHQQIILDKGMLVAIDELMQSLNHNGETLRQKPPVGEADPYRVKMKLCILLHAFSTRVVTINRVMGYLSSASGGPGPAGMKGLPGSGGGGSGGGGSGGGGSGGGGSGGGGSGGGGSQSVLTQPPSVSGAPGQRVTISCSGSRSNIGSNTVKWYQQLPGTAPKLLIYYNDQRPSGVPDRFSGSKSGTSASLAITGLQAEDEADYYCQSYDRYTHPALLFGTGTKVTVLGGGGSGGGGSGGGGSQVQLVESGGGVVQPGRSLRLSCAASGFTFSSYGMHWVRQAPGKGLEWVAFIRYDGSNKYYADSVKGRFTISRDNSKNTLYLQMNSLRAEDTAVYYCKTHGSHDNWGQGTMVTVSSSGGPGPAGMKGLPGSVPRDCGCKPCICTVPEVSSVFIFPPKPKDVLTITLTPKVTCVVVDISKDDPEVQFSWFVDDVEVHTAQTQPREEQFNSTFRSVSELPIMHQDWLNGKEFKCRVNSAAFPAPIEKTISKTKGRPKAPQVYTIPPPKEQMAKDKVSLTCMITDFFPEDITVEWQWNGQPAENYKNTQPIMDTDGSYFVYSKLNVQKSNWEAGNTFTCSVLHEGLHNHHTEKSLSHSPGKHHHHHH

SEQ ID NO: 439 - protein, 936 aa, Artificial Sequence
  Description of Artificial Sequence: Synthetic polypeptide
EVQLVESGGGLVQPGNSLRLSCAASGFTFSKFGMSWVRQAPGKGLEWVSSISGSGRDTLYAESVKGRFTISRDNAKTTLYLQMNSLRPEDTAVYYCTIGGSLSVSSQGTLVTVSSSGGPGPAGMKGLPGSIWELKKDVYVVELDWYPDAPGEMVVLTCDTPEEDGITWTLDQSSEVLGSGKTLTIQVKEFGDAGQYTCHKGGEVLSHSLLLLHKKEDGIWSTDILKDQKEPKNKTFLRCEAKNYSGRFTCWWLTTISTDLTFSVKSSRGSSDPQGVTCGAATLSAERVRGDNKEYEYSVECQEDSACPAAEESLPIEVMVDAVHKLKYENYTSSFFIRDIIKPDPPKNLQLKPLKNSRQVEVSWEYPDTWSTPHSYFSLTFCVQVQGKSKREKKDRVFTDKTSATVICRKNASISVRAQDRYYSSSWSEWASVPCSGGGGSGGGGSGGGGSRVIPVSGPARCLSQSRNLLKTTDDMVKTAREKLKHYSCTAEDIDHEDITRDQTSTLKTCLPLELHKNESCLATRETSSTTRGSCLPPQKTSLMMTLCLGSIYEDLKMYQTEFQAINAALQNHNHQQIILDKGMLVAIDELMQSLNHNGETLRQKPPVGEADPYRVKMKLCILLHAFSTRVVTINRVMGYLSSASGGPGPAGMKGLPGSGGGGSGGGGSGGGGSGGGGSGGGGSGGGGSQSVLTQPPSVSGAPGQRVTISCSGSRSNIGSNTVKWYQQLPGTAPKLLIYYNDQRPSGVPDRFSGSKSGTSASLAITGLQAEDEADYYCQSYDRYTHPALLFGTGTKVTVLSGGPGPAGMKGLPGSQVQLVESGGGVVQPGRSLRLSCAASGFTFSSYGMHWVRQAPGKGLEWVAFIRYDGSNKYYADSVKGRFTISRDNSKNTLYLQMNSLRAEDTAVYYCKTHGSHDNWGQGTMVTVSSHHHHHH

SEQ ID NO: 440 - protein, 817 aa, Artificial Sequence
  Description of Artificial Sequence: Synthetic polypeptide
EVQLVESGGGLVQPGNSLRLSCAASGFTFSKFGMSWVRQAPGKGLEWVSSISGSGRDTLYAESVKGRFTISRDNAKTTLYLQMNSLRPEDTAVYYCTIGGSLSVSSQGTLVTVSSSGGPGPAGMKGLPGSIWELKKDVYVVELDWYPDAPGEMVVLTCDTPEEDGITWTLDQSSEVLGSGKTLTIQVKEFGDAGQYTCHKGGEVLSHSLLLLHKKEDGIWSTDILKDQKEPKNKTFLRCEAKNYSGRFTCWWLTTISTDLTFSVKSSRGSSDPQGVTCGAATLSAERVRGDNKEYEYSVECQEDSACPAAEESLPIEVMVDAVHKLKYENYTSSFFIRDIIKPDPPKNLQLKPLKNSRQVEVSWEYPDTWSTPHSYFSLTFCVQVQGKSKREKKDRVFTDKTSATVICRKNASISVRAQDRYYSSSWSEWASVPCSGGGGSGGGGSGGGGSRVIPVSGPARCLSQSRNLLKTTDDMVKTAREKLKHYSCTAEDIDHEDITRDQTSTLKTCLPLELHKNESCLATRETSSTTRGSCLPPQKTSLMMTLCLGSIYEDLKMYQTEFQAINAALQNHNHQQIILDKGMLVAIDELMQSLNHNGETLRQKPPVGEADPYRVKMKLCILLHAFSTRVVTINRVMGYLSSASGGPGPAGMKGLPGSGGGGSGGGGSGGGGSGGGGSGGGGSGGGGSQVQLQESGGGLVQAGGSLRLSCAASGRTFSSVYDMGWFRQAPGKDREFVARITESARNTRYADSVRGRFTISRDNAKNTVYLQMNNLELEDAAVYYCAADPQTVVVGTPDYWGQGTQVTVSSHHHHHH

SEQ ID NO: 441 - protein, 547 aa, Artificial Sequence
  Description of Artificial Sequence: Synthetic polypeptide
APTSSSTKKTQLQLEHLLLDLQMILNGINNYKNPKLTRMLTFKFYMPKKATELKHLQCLEEELKPLEEVLNLAQSKNFHLRPRDLISNINVIVLELKGSETTFMCEYADETATIVEFLNRWITFCQSIISTLTSGGPALFKSSFPPGSEVQLVESGGGLVQPGNSLRLSCAASGFTFSKFGMSWVRQAPGKGLEWVSSISGSGRDTLYAESVKGRFTISRDNAKTTLYLQMNSLRPEDTAVYYCTIGGSLSVSSQGTLVTVSSGGGGSGGGGSGGGGSGGGGSGGGGSGGGGSSGGPALFKSSFPPGSEVQLVESGGGLVQPGGSLRLSCAASGFTFSSYTLAWVRQAPGKGLEWVAAIDSSSYTYSPDTVRGRFTISRDNAKNSLYLQMNSLRAEDTAVYYCARDSNWDALDYWGCGTTVTVSSGGGGSGGGGSGGGGSDIQMTQSPSSLSASVGDRVTITCKVTEKVWGNVAWYQQKPGKCPISLIYSPSLRKSGVPSRFSGSGSGTDFTLTISSLQPEDFATYYCQQYYTYPYTFGGGTKVEIK

SEQ ID NO: 442 - protein, 5 aa, Unknown
  Description of Unknown: Sortase A cleavage site
  MOD_RES (3)..(3): Any amino acid
LPXTG

SEQ ID NO: 443 - protein, 25 aa, Artificial Sequence
  Description of Artificial Sequence: Synthetic peptide
  MISC_FEATURE (1)..(25): This sequence may encompass 1-5 "Gly Gly Gly Gly Ser" repeating units
GGGGSGGGGSGGGGSGGGGSGGGGS

SEQ ID NO: 444 - protein, 20 aa, Artificial Sequence
  Description of Artificial Sequence: Synthetic peptide
  MISC_FEATURE (1)..(20): This sequence may encompass 1-5 "Gly Gly Gly Ser" repeating units
GGGSGGGSGGGSGGGSGGGS

SEQ ID NO: 445 - protein, 7 aa, Unknown
  Description of Unknown: protease-cleavable sequence
GPLGVRG

SEQ ID NO: 446 - protein, 8 aa, Unknown
  Description of Unknown: protease-cleavable sequence
IPVSLRSG

SEQ ID NO: 447 - protein, 8 aa, Unknown
  Description of Unknown: protease-cleavable sequence
VPLSLYSG

SEQ ID NO: 448 - protein, 10 aa, Unknown
  Description of Unknown: protease-cleavable sequence
SGESPAYYTA

SEQ ID NO: 449 - protein, 5 aa, Artificial Sequence
  Description of Artificial Sequence: Synthetic peptide
GGGGS

SEQ ID NO: 450 - protein, 6 aa, Artificial Sequence
  Description of Artificial Sequence: Synthetic peptide
GSGSGS

SEQ ID NO: 451 - protein, 13 aa, Artificial Sequence
  Description of Artificial Sequence: Synthetic peptide
GSGGGSGGGSGGT

SEQ ID NO: 452 - protein, 15 aa, Artificial Sequence
  Description of Artificial Sequence: Synthetic peptide
GGGGSGGGGSGGGGS

SEQ ID NO: 453 - protein, 20 aa, Artificial Sequence
  Description of Artificial Sequence: Synthetic peptide
GGGGSGGGGSGGGGSGGGGS

1-72. (canceled)

73. A fusion polypeptide having the Formula: [D]-[L1]-[A]-[L2]-[D], wherein A is a human interferon (IFN) polypeptide selected from a human interferon alpha (IFNa) polypeptide or a mutein thereof or a human interferon beta (IFNb) polypeptide or a mutein thereof; L1 and L2 are each independently a protease-cleavable polypeptide linker; and D is an IFN blocking moiety,

74. The fusion polypeptide of claim 73, wherein the IFN polypeptide comprises an IFNa polypeptide, functional fragment, or mutein thereof,

75. The fusion polypeptide of claim 73, wherein the IFN polypeptide comprises an IFNb polypeptide, functional fragment, or mutein thereof.

76. The fusion polypeptide of claim 73, wherein D is an IFN blocking moiety, which also extends in vivo half-life.

77. The fusion polypeptide of claim 74, wherein when the IFNa polypeptide and the IFNa blocking moiety are operably linked by the protease-cleavable polypeptide linker, the fusion polypeptide has attenuated IFNa-receptor activating activity, and wherein when cleavage of both linkers occurs, in vivo half-life of the IFNa polypeptide is substantially similar to that of naturally occurring human IFNa.

78. The fusion polypeptide of claim 75, wherein when the IFNb polypeptide and the IFNb blocking moiety are operably linked by the protease-cleavable polypeptide linker, the fusion polypeptide has attenuated IFNb-receptor activating activity, and wherein when cleavage of both linkers occurs, in vivo half-life of the IFNb polypeptide is substantially similar to that of naturally occurring human IFNb.

79. The fusion polypeptide of claim 74, wherein the IFNa-receptor activating activity of the fusion polypeptide is at least about 10X less than the interferon-receptor activating activity of the IFNa polypeptide that is produced by cleavage of the protease cleavable linker.

80. The fusion polypeptide of claim 75, wherein the IFNb-receptor activating activity of the fusion polypeptide is at least about 10× less than the interferon-receptor activating activity of the IFNb polypeptide that is produced by cleavage of the protease cleavable linker.

81. The fusion polypeptide of claim 73, wherein D comprises a serum albumin binding domain, a serum albumin, transferrin, or immunoglobulin Fc, or a fragment thereof.

82. The fusion polypeptide of claim 73, further comprising a tumortargeting domain.

83. A fusion polypeptide having the Formula: [D1]-[L]-[A]-[L2]-[D2], wherein A is a human IFN polypeptide, L1 and L2 are each independently a protease-cleavable polypeptide linker; and either D1 is human serum albumin or a fragment thereof, and D2 is a human serum albumin binding domain or D2 is human serum albumin or a fragment thereof, and D1 is a human serum albumin binding domain.

84. The fusion polypeptide of claim 83, wherein D comprises an IFN receptor or fragment thereof.

85. The fusion polypeptide of claim 73, further comprising a half-life extension domain.

86. A method of treating a human subject with or at risk of developing cancer or a viral infection associated with cancer, comprising administering to the subject in need thereof an effective amount of a fusion polypeptide having the Formula: [D]-[L1]-[A]-[L2]-[D], wherein A is a human interferon (IFN) polypeptide, L1 and L2 are each independently a protease-cleavable polypeptide linker; and D is an IFN blocking moiety which also extends in vivo half-life.

87. The method of claim 86, further comprising administering to the subject and an anti-PD-L1, anti-CTLA4, or anti-PD-1 antibody.

88. The method of claim 86, further comprising administering to the subject an IL-2 polypeptide and/or an IL-12 polypeptide.
